United States Patent Application Publication US 2024/0374759 A1 - sequence listing, part 4

SEQ ID NO: 2743 - protein, 2091 aa, synthetic construct
  source 1..2091: note = Description of Artificial Sequence: Synthetic polypeptide
MPAAKRVKLDGGDKKYSIGLDIGTNSVGWAVITDEYKVPSKKFKVLGNTDRHSIKKNLIGALLFDSGETAEATRLKRTARRRYTRRKNRICYLQEIFSNEMAKVDDSFFHRLEESFLVEEDKKHERHPIFGNIVDEVAYHEKYPTIYHLRKKLVDSTDKADLRLIYLALAHMIKFRGHFLIEGDLNPDNSDVDKLFIQLVQTYNQLFEENPINASGVDAKAILSARLSKSRRLENLIAQLPGEKKNGLFGNLIALSLGLTPNFKSNFDLAEDAKLQLSKDTYDDDLDNLLAQIGDQYADLFLAAKNLSDAILLSDILRVNTEITKAPLSASMIKRYDEHHQDLTLLKALVRQQLPEKYKEIFFDQSKNGYAGYIDGGASQEEFYKFIKPILEKMDGTEELLVKLNREDLLRKQRTFDNGSIPHQIHLGELHAILRRQEDFYPFLKDNREKIEKILTFRIPYYVGPLARGNSRFAWMTRKSEETITPWNFEEVVDKGASAQSFIERMTNFDKNLPNEKVLPKHSLLYEYFTVYNELTKVKYVTEGMRKPAFLSGEQKKAIVDLLFKTNRKVTVKQLKEDYFKKIECFDSVEISGVEDRFNASLGTYHDLLKIIKDKDFLDNEENEDILEDIVLTLTLFEDREMIEERLKTYAHLFDDKVMKQLKRRRYTGWGRLSRKLINGIRDKQSGKTILDFLKSDGFANRNFMQLIHDDSLTFKEDIQKAQVSGQGDSLHEHIANLAGSPAIKKGILQTVKVVDELVKVMGRHKPENIVIEMARENQTTQKGQKNSRERMKRIEEGIKELGSQILKEHPVENTQLQNEKLYLYYLQNGRDMYVDQELDINRLSDYDVDHIVPQSFLKDDSIDNKVLTRSDKARGKSDNVPSEEVVKKMKNYWRQLLNAKLITQRKFDNLTKAERGGLSELDKAGFIKRQLVETRQITKHVAQILDSRMNTKYDENDKLIREVKVITLKSKLVSDFRKDFQFYKVREINNYHHAHDAYLNAVVGTALIKKYPKLESEFVYGDYKVYDVRKMIAKSEQEIGKATAKYFFYSNIMNFFKTEITLANGEIRKRPLIETNGETGEIVWDKGRDFATVRKVLSMPQVNIVKKTEVQTGGFSKESILPKRNSDKLIARKKDWDPKKYGGFDSPTVAYSVLVVAKVEKGKSKKLKSVKELLGITIMERSSFEKNPIDFLEAKGYKEVKKDLIIKLPKYSLFELENGRKRMLASAGELQKGNELALPSKYVNFLYLASHYEKLKGSPEDNEQKQLFVEQHKHYLDEIIEQISEFSKRVILADANLDKVLSAYNKHRDKPIREQAENIIHLFTLTNLGAPAAFKYFDTTIDRKRYTSTKEVLDATLIHQSITGLYETRIDLSQLGGDGGPAPGGGGGTLNIEDEHRLHETSKEPDVSLGSTWLSDFPQAWAETGGMGLAVRQAPLIIPLKATSTPVSIKQYPMSQEARLGIKPHIQRLLDQGILVPCQSPWNTPLLPVKKPGTNDYRPVQDLREVNKRVEDIHPTVPNPYNLLSGLPPSHQWYTVLDLKDAFFCLRLHPTSQPLFAFEWRDPEMGISGQLTWTRLPQGFKNSPTLFNEALHRDLADFRIQHPDLILLQYVDDLLLAATSELDCQQGTRALLQTLGNLGYRASAKKAQICQKQVKYLGYLLKEGQRWLTEARKETVMGQPTPKTPRQLREFLGTAGFCRLWIPGFAEMAAPLYPLTKPGTLFNWGPDQQKAYQEIKQALLTAPALGLPDLTKPFELFVDEKQGYAKGVLTQKLGPWRRPVAYLSKKLDPVAAGWPPCLRMVAAIAVLTKDAGKLTMGQPLVILAPHAVEALVKQPPDRWLSNARMTHYQALLLDTDRVQFGPVVALNPATLLPLPEEGLQHNCLDILAEAHGTRPDLTDQPLPDADHTWYTDGSSLLQEGQRKAGAAVTTETEVIWAKALPAGTSAQRAELIALTQALKMAEGKKLNVYTDSRYAFATAHIHGEIYRRRGWLTSEGKEIKNKDEILALLKALFLPKRLSIIHCPGHQKGHSAEARGNRMADQAARKAAITETPDTSTLLAGKRTADGSEFEKRTADGSEFESPKKKAKVE

SEQ ID NO: 2744 - protein, 2096 aa, synthetic construct
  source 1..2096: note = Description of Artificial Sequence: Synthetic polypeptide
MPAAKRVKLDGGDKKYSIGLDIGTNSVGWAVITDEYKVPSKKFKVLGNTDRHSIKKNLIGALLFDSGETAEATRLKRTARRRYTRRKNRICYLQEIFSNEMAKVDDSFFHRLEESFLVEEDKKHERHPIFGNIVDEVAYHEKYPTIYHLRKKLVDSTDKADLRLIYLALAHMIKFRGHFLIEGDLNPDNSDVDKLFIQLVQTYNQLFEENPINASGVDAKAILSARLSKSRRLENLIAQLPGEKKNGLFGNLIALSLGLTPNFKSNFDLAEDAKLQLSKDTYDDDLDNLLAQIGDQYADLFLAAKNLSDAILLSDILRVNTEITKAPLSASMIKRYDEHHQDLTLLKALVRQQLPEKYKEIFFDQSKNGYAGYIDGGASQEEFYKFIKPILEKMDGTEELLVKLNREDLLRKQRTFDNGSIPHQIHLGELHAILRRQEDFYPFLKDNREKIEKILTFRIPYYVGPLARGNSRFAWMTRKSEETITPWNFEEVVDKGASAQSFIERMTNFDKNLPNEKVLPKHSLLYEYFTVYNELTKVKYVTEGMRKPAFLSGEQKKAIVDLLFKTNRKVTVKQLKEDYFKKIECFDSVEISGVEDRFNASLGTYHDLLKIIKDKDFLDNEENEDILEDIVLTLTLFEDREMIEERLKTYAHLFDDKVMKQLKRRRYTGWGRLSRKLINGIRDKQSGKTILDFLKSDGFANRNFMQLIHDDSLTFKEDIQKAQVSGQGDSLHEHIANLAGSPAIKKGILQTVKVVDELVKVMGRHKPENIVIEMARENQTTQKGQKNSRERMKRIEEGIKELGSQILKEHPVENTQLQNEKLYLYYLQNGRDMYVDQELDINRLSDYDVDHIVPQSFLKDDSIDNKVLTRSDKARGKSDNVPSEEVVKKMKNYWRQLLNAKLITQRKFDNLTKAERGGLSELDKAGFIKRQLVETRQITKHVAQILDSRMNTKYDENDKLIREVKVITLKSKLVSDFRKDFQFYKVREINNYHHAHDAYLNAVVGTALIKKYPKLESEFVYGDYKVYDVRKMIAKSEQEIGKATAKYFFYSNIMNFFKTEITLANGEIRKRPLIETNGETGEIVWDKGRDFATVRKVLSMPQVNIVKKTEVQTGGFSKESILPKRNSDKLIARKKDWDPKKYGGFDSPTVAYSVLVVAKVEKGKSKKLKSVKELLGITIMERSSFEKNPIDFLEAKGYKEVKKDLIIKLPKYSLFELENGRKRMLASAGELQKGNELALPSKYVNFLYLASHYEKLKGSPEDNEQKQLFVEQHKHYLDEIIEQISEFSKRVILADANLDKVLSAYNKHRDKPIREQAENIIHLFTLTNLGAPAAFKYFDTTIDRKRYTSTKEVLDATLIHQSITGLYETRIDLSQLGGDGGGGSEAAAKPAPGGTLNIEDEHRLHETSKEPDVSLGSTWLSDFPQAWAETGGMGLAVRQAPLIIPLKATSTPVSIKQYPMSQEARLGIKPHIQRLLDQGILVPCQSPWNTPLLPVKKPGTNDYRPVQDLREVNKRVEDIHPTVPNPYNLLSGLPPSHQWYTVLDLKDAFFCLRLHPTSQPLFAFEWRDPEMGISGQLTWTRLPQGFKNSPTLFNEALHRDLADFRIQHPDLILLQYVDDLLLAATSELDCQQGTRALLQTLGNLGYRASAKKAQICQKQVKYLGYLLKEGQRWLTEARKETVMGQPTPKTPRQLREFLGTAGFCRLWIPGFAEMAAPLYPLTKPGTLFNWGPDQQKAYQEIKQALLTAPALGLPDLTKPFELFVDEKQGYAKGVLTQKLGPWRRPVAYLSKKLDPVAAGWPPCLRMVAAIAVLTKDAGKLTMGQPLVILAPHAVEALVKQPPDRWLSNARMTHYQALLLDTDRVQFGPVVALNPATLLPLPEEGLQHNCLDILAEAHGTRPDLTDQPLPDADHTWYTDGSSLLQEGQRKAGAAVTTETEVIWAKALPAGTSAQRAELIALTQALKMAEGKKLNVYTDSRYAFATAHIHGEIYRRRGWLTSEGKEIKNKDEILALLKALFLPKRLSIIHCPGHQKGHSAEARGNRMADQAARKAAITETPDTSTLLAGKRTADGSEFEKRTADGSEFESPKKKAKVE

SEQ ID NO: 2745 - protein, 2096 aa, synthetic construct
  source 1..2096: note = Description of Artificial Sequence: Synthetic polypeptide
MPAAKRVKLDGGDKKYSIGLDIGTNSVGWAVITDEYKVPSKKFKVLGNTDRHSIKKNLIGALLFDSGETAEATRLKRTARRRYTRRKNRICYLQEIFSNEMAKVDDSFFHRLEESFLVEEDKKHERHPIFGNIVDEVAYHEKYPTIYHLRKKLVDSTDKADLRLIYLALAHMIKFRGHFLIEGDLNPDNSDVDKLFIQLVQTYNQLFEENPINASGVDAKAILSARLSKSRRLENLIAQLPGEKKNGLFGNLIALSLGLTPNFKSNFDLAEDAKLQLSKDTYDDDLDNLLAQIGDQYADLFLAAKNLSDAILLSDILRVNTEITKAPLSASMIKRYDEHHQDLTLLKALVRQQLPEKYKEIFFDQSKNGYAGYIDGGASQEEFYKFIKPILEKMDGTEELLVKLNREDLLRKQRTFDNGSIPHQIHLGELHAILRRQEDFYPFLKDNREKIEKILTFRIPYYVGPLARGNSRFAWMTRKSEETITPWNFEEVVDKGASAQSFIERMTNFDKNLPNEKVLPKHSLLYEYFTVYNELTKVKYVTEGMRKPAFLSGEQKKAIVDLLFKTNRKVTVKQLKEDYFKKIECFDSVEISGVEDRFNASLGTYHDLLKIIKDKDFLDNEENEDILEDIVLTLTLFEDREMIEERLKTYAHLFDDKVMKQLKRRRYTGWGRLSRKLINGIRDKQSGKTILDFLKSDGFANRNFMQLIHDDSLTFKEDIQKAQVSGQGDSLHEHIANLAGSPAIKKGILQTVKVVDELVKVMGRHKPENIVIEMARENQTTQKGQKNSRERMKRIEEGIKELGSQILKEHPVENTQLQNEKLYLYYLQNGRDMYVDQELDINRLSDYDVDHIVPQSFLKDDSIDNKVLTRSDKARGKSDNVPSEEVVKKMKNYWRQLLNAKLITQRKFDNLTKAERGGLSELDKAGFIKRQLVETRQITKHVAQILDSRMNTKYDENDKLIREVKVITLKSKLVSDFRKDFQFYKVREINNYHHAHDAYLNAVVGTALIKKYPKLESEFVYGDYKVYDVRKMIAKSEQEIGKATAKYFFYSNIMNFFKTEITLANGEIRKRPLIETNGETGEIVWDKGRDFATVRKVLSMPQVNIVKKTEVQTGGFSKESILPKRNSDKLIARKKDWDPKKYGGFDSPTVAYSVLVVAKVEKGKSKKLKSVKELLGITIMERSSFEKNPIDFLEAKGYKEVKKDLIIKLPKYSLFELENGRKRMLASAGELQKGNELALPSKYVNFLYLASHYEKLKGSPEDNEQKQLFVEQHKHYLDEIIEQISEFSKRVILADANLDKVLSAYNKHRDKPIREQAENIIHLFTLTNLGAPAAFKYFDTTIDRKRYTSTKEVLDATLIHQSITGLYETRIDLSQLGGDGGEAAAKGGGGGSGGTLNIEDEHRLHETSKEPDVSLGSTWLSDFPQAWAETGGMGLAVRQAPLIIPLKATSTPVSIKQYPMSQEARLGIKPHIQRLLDQGILVPCQSPWNTPLLPVKKPGTNDYRPVQDLREVNKRVEDIHPTVPNPYNLLSGLPPSHQWYTVLDLKDAFFCLRLHPTSQPLFAFEWRDPEMGISGQLTWTRLPQGFKNSPTLFNEALHRDLADFRIQHPDLILLQYVDDLLLAATSELDCQQGTRALLQTLGNLGYRASAKKAQICQKQVKYLGYLLKEGQRWLTEARKETVMGQPTPKTPRQLREFLGTAGFCRLWIPGFAEMAAPLYPLTKPGTLFNWGPDQQKAYQEIKQALLTAPALGLPDLTKPFELFVDEKQGYAKGVLTQKLGPWRRPVAYLSKKLDPVAAGWPPCLRMVAAIAVLTKDAGKLTMGQPLVILAPHAVEALVKQPPDRWLSNARMTHYQALLLDTDRVQFGPVVALNPATLLPLPEEGLQHNCLDILAEAHGTRPDLTDQPLPDADHTWYTDGSSLLQEGQRKAGAAVTTETEVIWAKALPAGTSAQRAELIALTQALKMAEGKKLNVYTDSRYAFATAHIHGEIYRRRGWLTSEGKEIKNKDEILALLKALFLPKRLSIIHCPGHQKGHSAEARGNRMADQAARKAAITETPDTSTLLAGKRTADGSEFEKRTADGSEFESPKKKAKVE

SEQ ID NO: 2746 - protein, 2093 aa, synthetic construct
  source 1..2093: note = Description of Artificial Sequence: Synthetic polypeptide
MPAAKRVKLDGGDKKYSIGLDIGTNSVGWAVITDEYKVPSKKFKVLGNTDRHSIKKNLIGALLFDSGETAEATRLKRTARRRYTRRKNRICYLQEIFSNEMAKVDDSFFHRLEESFLVEEDKKHERHPIFGNIVDEVAYHEKYPTIYHLRKKLVDSTDKADLRLIYLALAHMIKFRGHFLIEGDLNPDNSDVDKLFIQLVQTYNQLFEENPINASGVDAKAILSARLSKSRRLENLIAQLPGEKKNGLFGNLIALSLGLTPNFKSNFDLAEDAKLQLSKDTYDDDLDNLLAQIGDQYADLFLAAKNLSDAILLSDILRVNTEITKAPLSASMIKRYDEHHQDLTLLKALVRQQLPEKYKEIFFDQSKNGYAGYIDGGASQEEFYKFIKPILEKMDGTEELLVKLNREDLLRKQRTFDNGSIPHQIHLGELHAILRRQEDFYPFLKDNREKIEKILTFRIPYYVGPLARGNSRFAWMTRKSEETITPWNFEEVVDKGASAQSFIERMTNFDKNLPNEKVLPKHSLLYEYFTVYNELTKVKYVTEGMRKPAFLSGEQKKAIVDLLFKTNRKVTVKQLKEDYFKKIECFDSVEISGVEDRFNASLGTYHDLLKIIKDKDFLDNEENEDILEDIVLTLTLFEDREMIEERLKTYAHLFDDKVMKQLKRRRYTGWGRLSRKLINGIRDKQSGKTILDFLKSDGFANRNFMQLIHDDSLTFKEDIQKAQVSGQGDSLHEHIANLAGSPAIKKGILQTVKVVDELVKVMGRHKPENIVIEMARENQTTQKGQKNSRERMKRIEEGIKELGSQILKEHPVENTQLQNEKLYLYYLQNGRDMYVDQELDINRLSDYDVDHIVPQSFLKDDSIDNKVLTRSDKARGKSDNVPSEEVVKKMKNYWRQLLNAKLITQRKFDNLTKAERGGLSELDKAGFIKRQLVETRQITKHVAQILDSRMNTKYDENDKLIREVKVITLKSKLVSDFRKDFQFYKVREINNYHHAHDAYLNAVVGTALIKKYPKLESEFVYGDYKVYDVRKMIAKSEQEIGKATAKYFFYSNIMNFFKTEITLANGEIRKRPLIETNGETGEIVWDKGRDFATVRKVLSMPQVNIVKKTEVQTGGFSKESILPKRNSDKLIARKKDWDPKKYGGFDSPTVAYSVLVVAKVEKGKSKKLKSVKELLGITIMERSSFEKNPIDFLEAKGYKEVKKDLIIKLPKYSLFELENGRKRMLASAGELQKGNELALPSKYVNFLYLASHYEKLKGSPEDNEQKQLFVEQHKHYLDEIIEQISEFSKRVILADANLDKVLSAYNKHRDKPIREQAENIIHLFTLTNLGAPAAFKYFDTTIDRKRYTSTKEVLDATLIHQSITGLYETRIDLSQLGGDGGGGGEAAAKGGTLNIEDEHRLHETSKEPDVSLGSTWLSDFPQAWAETGGMGLAVRQAPLIIPLKATSTPVSIKQYPMSQEARLGIKPHIQRLLDQGILVPCQSPWNTPLLPVKKPGTNDYRPVQDLREVNKRVEDIHPTVPNPYNLLSGLPPSHQWYTVLDLKDAFFCLRLHPTSQPLFAFEWRDPEMGISGQLTWTRLPQGFKNSPTLFNEALHRDLADFRIQHPDLILLQYVDDLLLAATSELDCQQGTRALLQTLGNLGYRASAKKAQICQKQVKYLGYLLKEGQRWLTEARKETVMGQPTPKTPRQLREFLGTAGFCRLWIPGFAEMAAPLYPLTKPGTLFNWGPDQQKAYQEIKQALLTAPALGLPDLTKPFELFVDEKQGYAKGVLTQKLGPWRRPVAYLSKKLDPVAAGWPPCLRMVAAIAVLTKDAGKLTMGQPLVILAPHAVEALVKQPPDRWLSNARMTHYQALLLDTDRVQFGPVVALNPATLLPLPEEGLQHNCLDILAEAHGTRPDLTDQPLPDADHTWYTDGSSLLQEGQRKAGAAVTTETEVIWAKALPAGTSAQRAELIALTQALKMAEGKKLNVYTDSRYAFATAHIHGEIYRRRGWLTSEGKEIKNKDEILALLKALFLPKRLSIIHCPGHQKGHSAEARGNRMADQAARKAAITETPDTSTLLAGKRTADGSEFEKRTADGSEFESPKKKAKVE

SEQ ID NO: 2747 - protein, 2096 aa, synthetic construct
  source 1..2096: note = Description of Artificial Sequence: Synthetic polypeptide
MPAAKRVKLDGGDKKYSIGLDIGTNSVGWAVITDEYKVPSKKFKVLGNTDRHSIKKNLIGALLFDSGETAEATRLKRTARRRYTRRKNRICYLQEIFSNEMAKVDDSFFHRLEESFLVEEDKKHERHPIFGNIVDEVAYHEKYPTIYHLRKKLVDSTDKADLRLIYLALAHMIKFRGHFLIEGDLNPDNSDVDKLFIQLVQTYNQLFEENPINASGVDAKAILSARLSKSRRLENLIAQLPGEKKNGLFGNLIALSLGLTPNFKSNFDLAEDAKLQLSKDTYDDDLDNLLAQIGDQYADLFLAAKNLSDAILLSDILRVNTEITKAPLSASMIKRYDEHHQDLTLLKALVRQQLPEKYKEIFFDQSKNGYAGYIDGGASQEEFYKFIKPILEKMDGTEELLVKLNREDLLRKQRTFDNGSIPHQIHLGELHAILRRQEDFYPFLKDNREKIEKILTFRIPYYVGPLARGNSRFAWMTRKSEETITPWNFEEVVDKGASAQSFIERMTNFDKNLPNEKVLPKHSLLYEYFTVYNELTKVKYVTEGMRKPAFLSGEQKKAIVDLLFKTNRKVTVKQLKEDYFKKIECFDSVEISGVEDRFNASLGTYHDLLKIIKDKDFLDNEENEDILEDIVLTLTLFEDREMIEERLKTYAHLFDDKVMKQLKRRRYTGWGRLSRKLINGIRDKQSGKTILDFLKSDGFANRNFMQLIHDDSLTFKEDIQKAQVSGQGDSLHEHIANLAGSPAIKKGILQTVKVVDELVKVMGRHKPENIVIEMARENQTTQKGQKNSRERMKRIEEGIKELGSQILKEHPVENTQLQNEKLYLYYLQNGRDMYVDQELDINRLSDYDVDHIVPQSFLKDDSIDNKVLTRSDKARGKSDNVPSEEVVKKMKNYWRQLLNAKLITQRKFDNLTKAERGGLSELDKAGFIKRQLVETRQITKHVAQILDSRMNTKYDENDKLIREVKVITLKSKLVSDFRKDFQFYKVREINNYHHAHDAYLNAVVGTALIKKYPKLESEFVYGDYKVYDVRKMIAKSEQEIGKATAKYFFYSNIMNFFKTEITLANGEIRKRPLIETNGETGEIVWDKGRDFATVRKVLSMPQVNIVKKTEVQTGGFSKESILPKRNSDKLIARKKDWDPKKYGGFDSPTVAYSVLVVAKVEKGKSKKLKSVKELLGITIMERSSFEKNPIDFLEAKGYKEVKKDLIIKLPKYSLFELENGRKRMLASAGELQKGNELALPSKYVNFLYLASHYEKLKGSPEDNEQKQLFVEQHKHYLDEIIEQISEFSKRVILADANLDKVLSAYNKHRDKPIREQAENIIHLFTLTNLGAPAAFKYFDTTIDRKRYTSTKEVLDATLIHQSITGLYETRIDLSQLGGDGGGGSGSSEAAAKGGTLNIEDEHRLHETSKEPDVSLGSTWLSDFPQAWAETGGMGLAVRQAPLIIPLKATSTPVSIKQYPMSQEARLGIKPHIQRLLDQGILVPCQSPWNTPLLPVKKPGTNDYRPVQDLREVNKRVEDIHPTVPNPYNLLSGLPPSHQWYTVLDLKDAFFCLRLHPTSQPLFAFEWRDPEMGISGQLTWTRLPQGFKNSPTLFNEALHRDLADFRIQHPDLILLQYVDDLLLAATSELDCQQGTRALLQTLGNLGYRASAKKAQICQKQVKYLGYLLKEGQRWLTEARKETVMGQPTPKTPRQLREFLGTAGFCRLWIPGFAEMAAPLYPLTKPGTLFNWGPDQQKAYQEIKQALLTAPALGLPDLTKPFELFVDEKQGYAKGVLTQKLGPWRRPVAYLSKKLDPVAAGWPPCLRMVAAIAVLTKDAGKLTMGQPLVILAPHAVEALVKQPPDRWLSNARMTHYQALLLDTDRVQFGPVVALNPATLLPLPEEGLQHNCLDILAEAHGTRPDLTDQPLPDADHTWYTDGSSLLQEGQRKAGAAVTTETEVIWAKALPAGTSAQRAELIALTQALKMAEGKKLNVYTDSRYAFATAHIHGEIYRRRGWLTSEGKEIKNKDEILALLKALFLPKRLSIIHCPGHQKGHSAEARGNRMADQAARKAAITETPDTSTLLAGKRTADGSEFEKRTADGSEFESPKKKAKVE

SEQ ID NO: 2748 - protein, 2096 aa, synthetic construct
  source 1..2096: note = Description of Artificial Sequence: Synthetic polypeptide
MPAAKRVKLDGGDKKYSIGLDIGTNSVGWAVITDEYKVPSKKFKVLGNTDRHSIKKNLIGALLFDSGETAEATRLKRTARRRYTRRKNRICYLQEIFSNEMAKVDDSFFHRLEESFLVEEDKKHERHPIFGNIVDEVAYHEKYPTIYHLRKKLVDSTDKADLRLIYLALAHMIKFRGHFLIEGDLNPDNSDVDKLFIQLVQTYNQLFEENPINASGVDAKAILSARLSKSRRLENLIAQLPGEKKNGLFGNLIALSLGLTPNFKSNFDLAEDAKLQLSKDTYDDDLDNLLAQIGDQYADLFLAAKNLSDAILLSDILRVNTEITKAPLSASMIKRYDEHHQDLTLLKALVRQQLPEKYKEIFFDQSKNGYAGYIDGGASQEEFYKFIKPILEKMDGTEELLVKLNREDLLRKQRTFDNGSIPHQIHLGELHAILRRQEDFYPFLKDNREKIEKILTFRIPYYVGPLARGNSRFAWMTRKSEETITPWNFEEVVDKGASAQSFIERMTNFDKNLPNEKVLPKHSLLYEYFTVYNELTKVKYVTEGMRKPAFLSGEQKKAIVDLLFKTNRKVTVKQLKEDYFKKIECFDSVEISGVEDRFNASLGTYHDLLKIIKDKDFLDNEENEDILEDIVLTLTLFEDREMIEERLKTYAHLFDDKVMKQLKRRRYTGWGRLSRKLINGIRDKQSGKTILDFLKSDGFANRNFMQLIHDDSLTFKEDIQKAQVSGQGDSLHEHIANLAGSPAIKKGILQTVKVVDELVKVMGRHKPENIVIEMARENQTTQKGQKNSRERMKRIEEGIKELGSQILKEHPVENTQLQNEKLYLYYLQNGRDMYVDQELDINRLSDYDVDHIVPQSFLKDDSIDNKVLTRSDKARGKSDNVPSEEVVKKMKNYWRQLLNAKLITQRKFDNLTKAERGGLSELDKAGFIKRQLVETRQITKHVAQILDSRMNTKYDENDKLIREVKVITLKSKLVSDFRKDFQFYKVREINNYHHAHDAYLNAVVGTALIKKYPKLESEFVYGDYKVYDVRKMIAKSEQEIGKATAKYFFYSNIMNFFKTEITLANGEIRKRPLIETNGETGEIVWDKGRDFATVRKVLSMPQVNIVKKTEVQTGGFSKESILPKRNSDKLIARKKDWDPKKYGGFDSPTVAYSVLVVAKVEKGKSKKLKSVKELLGITIMERSSFEKNPIDFLEAKGYKEVKKDLIIKLPKYSLFELENGRKRMLASAGELQKGNELALPSKYVNFLYLASHYEKLKGSPEDNEQKQLFVEQHKHYLDEIIEQISEFSKRVILADANLDKVLSAYNKHRDKPIREQAENIIHLFTLTNLGAPAAFKYFDTTIDRKRYTSTKEVLDATLIHQSITGLYETRIDLSQLGGDGGPAPGSSEAAAKGGTLNIEDEHRLHETSKEPDVSLGSTWLSDFPQAWAETGGMGLAVRQAPLIIPLKATSTPVSIKQYPMSQEARLGIKPHIQRLLDQGILVPCQSPWNTPLLPVKKPGTNDYRPVQDLREVNKRVEDIHPTVPNPYNLLSGLPPSHQWYTVLDLKDAFFCLRLHPTSQPLFAFEWRDPEMGISGQLTWTRLPQGFKNSPTLFNEALHRDLADFRIQHPDLILLQYVDDLLLAATSELDCQQGTRALLQTLGNLGYRASAKKAQICQKQVKYLGYLLKEGQRWLTEARKETVMGQPTPKTPRQLREFLGTAGFCRLWIPGFAEMAAPLYPLTKPGTLFNWGPDQQKAYQEIKQALLTAPALGLPDLTKPFELFVDEKQGYAKGVLTQKLGPWRRPVAYLSKKLDPVAAGWPPCLRMVAAIAVLTKDAGKLTMGQPLVILAPHAVEALVKQPPDRWLSNARMTHYQALLLDTDRVQFGPVVALNPATLLPLPEEGLQHNCLDILAEAHGTRPDLTDQPLPDADHTWYTDGSSLLQEGQRKAGAAVTTETEVIWAKALPAGTSAQRAELIALTQALKMAEGKKLNVYTDSRYAFATAHIHGEIYRRRGWLTSEGKEIKNKDEILALLKALFLPKRLSIIHCPGHQKGHSAEARGNRMADQAARKAAITETPDTSTLLAGKRTADGSEFEKRTADGSEFESPKKKAKVE

SEQ ID NO: 2749 - protein, 2095 aa, synthetic construct
  source 1..2095: note = Description of Artificial Sequence: Synthetic polypeptide
MPAAKRVKLDGGDKKYSIGLDIGTNSVGWAVITDEYKVPSKKFKVLGNTDRHSIKKNLIGALLFDSGETAEATRLKRTARRRYTRRKNRICYLQEIFSNEMAKVDDSFFHRLEESFLVEEDKKHERHPIFGNIVDEVAYHEKYPTIYHLRKKLVDSTDKADLRLIYLALAHMIKFRGHFLIEGDLNPDNSDVDKLFIQLVQTYNQLFEENPINASGVDAKAILSARLSKSRRLENLIAQLPGEKKNGLFGNLIALSLGLTPNFKSNFDLAEDAKLQLSKDTYDDDLDNLLAQIGDQYADLFLAAKNLSDAILLSDILRVNTEITKAPLSASMIKRYDEHHQDLTLLKALVRQQLPEKYKEIFFDQSKNGYAGYIDGGASQEEFYKFIKPILEKMDGTEELLVKLNREDLLRKQRTFDNGSIPHQIHLGELHAILRRQEDFYPFLKDNREKIEKILTFRIPYYVGPLARGNSRFAWMTRKSEETITPWNFEEVVDKGASAQSFIERMTNFDKNLPNEKVLPKHSLLYEYFTVYNELTKVKYVTEGMRKPAFLSGEQKKAIVDLLFKTNRKVTVKQLKEDYFKKIECFDSVEISGVEDRFNASLGTYHDLLKIIKDKDFLDNEENEDILEDIVLTLTLFEDREMIEERLKTYAHLFDDKVMKQLKRRRYTGWGRLSRKLINGIRDKQSGKTILDFLKSDGFANRNFMQLIHDDSLTFKEDIQKAQVSGQGDSLHEHIANLAGSPAIKKGILQTVKVVDELVKVMGRHKPENIVIEMARENQTTQKGQKNSRERMKRIEEGIKELGSQILKEHPVENTQLQNEKLYLYYLQNGRDMYVDQELDINRLSDYDVDHIVPQSFLKDDSIDNKVLTRSDKARGKSDNVPSEEVVKKMKNYWRQLLNAKLITQRKFDNLTKAERGGLSELDKAGFIKRQLVETRQITKHVAQILDSRMNTKYDENDKLIREVKVITLKSKLVSDFRKDFQFYKVREINNYHHAHDAYLNAVVGTALIKKYPKLESEFVYGDYKVYDVRKMIAKSEQEIGKATAKYFFYSNIMNFFKTEITLANGEIRKRPLIETNGETGEIVWDKGRDFATVRKVLSMPQVNIVKKTEVQTGGFSKESILPKRNSDKLIARKKDWDPKKYGGFDSPTVAYSVLVVAKVEKGKSKKLKSVKELLGITIMERSSFEKNPIDFLEAKGYKEVKKDLIIKLPKYSLFELENGRKRMLASAGELQKGNELALPSKYVNFLYLASHYEKLKGSPEDNEQKQLFVEQHKHYLDEIIEQISEFSKRVILADANLDKVLSAYNKHRDKPIREQAENIIHLFTLTNLGAPAAFKYFDTTIDRKRYTSTKEVLDATLIHQSITGLYETRIDLSQLGGDGGGGGGSGGGGSGGTLNIEDEHRLHETSKEPDVSLGSTWLSDFPQAWAETGGMGLAVRQAPLIIPLKATSTPVSIKQYPMSQEARLGIKPHIQRLLDQGILVPCQSPWNTPLLPVKKPGTNDYRPVQDLREVNKRVEDIHPTVPNPYNLLSGLPPSHQWYTVLDLKDAFFCLRLHPTSQPLFAFEWRDPEMGISGQLTWTRLPQGFKNSPTLFNEALHRDLADFRIQHPDLILLQYVDDLLLAATSELDCQQGTRALLQTLGNLGYRASAKKAQICQKQVKYLGYLLKEGQRWLTEARKETVMGQPTPKTPRQLREFLGTAGFCRLWIPGFAEMAAPLYPLTKPGTLFNWGPDQQKAYQEIKQALLTAPALGLPDLTKPFELFVDEKQGYAKGVLTQKLGPWRRPVAYLSKKLDPVAAGWPPCLRMVAAIAVLTKDAGKLTMGQPLVILAPHAVEALVKQPPDRWLSNARMTHYQALLLDTDRVQFGPVVALNPATLLPLPEEGLQHNCLDILAEAHGTRPDLTDQPLPDADHTWYTDGSSLLQEGQRKAGAAVTTETEVIWAKALPAGTSAQRAELIALTQALKMAEGKKLNVYTDSRYAFATAHIHGEIYRRRGWLTSEGKEIKNKDEILALLKALFLPKRLSIIHCPGHQKGHSAEARGNRMADQAARKAAITETPDTSTLLAGKRTADGSEFEKRTADGSEFESPKKKAKVE

SEQ ID NO: 2750 - protein, 2091 aa, synthetic construct
  source 1..2091: note = Description of Artificial Sequence: Synthetic polypeptide
MPAAKRVKLDGGDKKYSIGLDIGTNSVGWAVITDEYKVPSKKFKVLGNTDRHSIKKNLIGALLFDSGETAEATRLKRTARRRYTRRKNRICYLQEIFSNEMAKVDDSFFHRLEESFLVEEDKKHERHPIFGNIVDEVAYHEKYPTIYHLRKKLVDSTDKADLRLIYLALAHMIKFRGHFLIEGDLNPDNSDVDKLFIQLVQTYNQLFEENPINASGVDAKAILSARLSKSRRLENLIAQLPGEKKNGLFGNLIALSLGLTPNFKSNFDLAEDAKLQLSKDTYDDDLDNLLAQIGDQYADLFLAAKNLSDAILLSDILRVNTEITKAPLSASMIKRYDEHHQDLTLLKALVRQQLPEKYKEIFFDQSKNGYAGYIDGGASQEEFYKFIKPILEKMDGTEELLVKLNREDLLRKQRTFDNGSIPHQIHLGELHAILRRQEDFYPFLKDNREKIEKILTFRIPYYVGPLARGNSRFAWMTRKSEETITPWNFEEVVDKGASAQSFIERMTNFDKNLPNEKVLPKHSLLYEYFTVYNELTKVKYVTEGMRKPAFLSGEQKKAIVDLLFKTNRKVTVKQLKEDYFKKIECFDSVEISGVEDRFNASLGTYHDLLKIIKDKDFLDNEENEDILEDIVLTLTLFEDREMIEERLKTYAHLFDDKVMKQLKRRRYTGWGRLSRKLINGIRDKQSGKTILDFLKSDGFANRNFMQLIHDDSLTFKEDIQKAQVSGQGDSLHEHIANLAGSPAIKKGILQTVKVVDELVKVMGRHKPENIVIEMARENQTTQKGQKNSRERMKRIEEGIKELGSQILKEHPVENTQLQNEKLYLYYLQNGRDMYVDQELDINRLSDYDVDHIVPQSFLKDDSIDNKVLTRSDKARGKSDNVPSEEVVKKMKNYWRQLLNAKLITQRKFDNLTKAERGGLSELDKAGFIKRQLVETRQITKHVAQILDSRMNTKYDENDKLIREVKVITLKSKLVSDFRKDFQFYKVREINNYHHAHDAYLNAVVGTALIKKYPKLESEFVYGDYKVYDVRKMIAKSEQEIGKATAKYFFYSNIMNFFKTEITLANGEIRKRPLIETNGETGEIVWDKGRDFATVRKVLSMPQVNIVKKTEVQTGGFSKESILPKRNSDKLIARKKDWDPKKYGGFDSPTVAYSVLVVAKVEKGKSKKLKSVKELLGITIMERSSFEKNPIDFLEAKGYKEVKKDLIIKLPKYSLFELENGRKRMLASAGELQKGNELALPSKYVNFLYLASHYEKLKGSPEDNEQKQLFVEQHKHYLDEIIEQISEFSKRVILADANLDKVLSAYNKHRDKPIREQAENIIHLFTLTNLGAPAAFKYFDTTIDRKRYTSTKEVLDATLIHQSITGLYETRIDLSQLGGDGGGSSPAPGGTLNIEDEHRLHETSKEPDVSLGSTWLSDFPQAWAETGGMGLAVRQAPLIIPLKATSTPVSIKQYPMSQEARLGIKPHIQRLLDQGILVPCQSPWNTPLLPVKKPGTNDYRPVQDLREVNKRVEDIHPTVPNPYNLLSGLPPSHQWYTVLDLKDAFFCLRLHPTSQPLFAFEWRDPEMGISGQLTWTRLPQGFKNSPTLFNEALHRDLADFRIQHPDLILLQYVDDLLLAATSELDCQQGTRALLQTLGNLGYRASAKKAQICQKQVKYLGYLLKEGQRWLTEARKETVMGQPTPKTPRQLREFLGTAGFCRLWIPGFAEMAAPLYPLTKPGTLFNWGPDQQKAYQEIKQALLTAPALGLPDLTKPFELFVDEKQGYAKGVLTQKLGPWRRPVAYLSKKLDPVAAGWPPCLRMVAAIAVLTKDAGKLTMGQPLVILAPHAVEALVKQPPDRWLSNARMTHYQALLLDTDRVQFGPVVALNPATLLPLPEEGLQHNCLDILAEAHGTRPDLTDQPLPDADHTWYTDGSSLLQEGQRKAGAAVTTETEVIWAKALPAGTSAQRAELIALTQALKMAEGKKLNVYTDSRYAFATAHIHGEIYRRRGWLTSEGKEIKNKDEILALLKALFLPKRLSIIHCPGHQKGHSAEARGNRMADQAARKAAITETPDTSTLLAGKRTADGSEFEKRTADGSEFESPKKKAKVE

SEQ ID NO: 2751 - protein, 2096 aa, synthetic construct
  source 1..2096: note = Description of Artificial Sequence: Synthetic polypeptide
MPAAKRVKLDGGDKKYSIGLDIGTNSVGWAVITDEYKVPSKKFKVLGNTDRHSIKKNLIGALLFDSGETAEATRLKRTARRRYTRRKNRICYLQEIFSNEMAKVDDSFFHRLEESFLVEEDKKHERHPIFGNIVDEVAYHEKYPTIYHLRKKLVDSTDKADLRLIYLALAHMIKFRGHFLIEGDLNPDNSDVDKLFIQLVQTYNQLFEENPINASGVDAKAILSARLSKSRRLENLIAQLPGEKKNGLFGNLIALSLGLTPNFKSNFDLAEDAKLQLSKDTYDDDLDNLLAQIGDQYADLFLAAKNLSDAILLSDILRVNTEITKAPLSASMIKRYDEHHQDLTLLKALVRQQLPEKYKEIFFDQSKNGYAGYIDGGASQEEFYKFIKPILEKMDGTEELLVKLNREDLLRKQRTFDNGSIPHQIHLGELHAILRRQEDFYPFLKDNREKIEKILTFRIPYYVGPLARGNSRFAWMTRKSEETITPWNFEEVVDKGASAQSFIERMTNFDKNLPNEKVLPKHSLLYEYFTVYNELTKVKYVTEGMRKPAFLSGEQKKAIVDLLFKTNRKVTVKQLKEDYFKKIECFDSVEISGVEDRFNASLGTYHDLLKIIKDKDFLDNEENEDILEDIVLTLTLFEDREMIEERLKTYAHLFDDKVMKQLKRRRYTGWGRLSRKLINGIRDKQSGKTILDFLKSDGFANRNFMQLIHDDSLTFKEDIQKAQVSGQGDSLHEHIANLAGSPAIKKGILQTVKVVDELVKVMGRHKPENIVIEMARENQTTQKGQKNSRERMKRIEEGIKELGSQILKEHPVENTQLQNEKLYLYYLQNGRDMYVDQELDINRLSDYDVDHIVPQSFLKDDSIDNKVLTRSDKARGKSDNVPSEEVVKKMKNYWRQLLNAKLITQRKFDNLTKAERGGLSELDKAGFIKRQLVETRQITKHVAQILDSRMNTKYDENDKLIREVKVITLKSKLVSDFRKDFQFYKVREINNYHHAHDAYLNAVVGTALIKKYPKLESEFVYGDYKVYDVRKMIAKSEQEIGKATAKYFFYSNIMNFFKTEITLANGEIRKRPLIETNGETGEIVWDKGRDFATVRKVLSMPQVNIVKKTEVQTGGFSKESILPKRNSDKLIARKKDWDPKKYGGFDSPTVAYSVLVVAKVEKGKSKKLKSVKELLGITIMERSSFEKNPIDFLEAKGYKEVKKDLIIKLPKYSLFELENGRKRMLASAGELQKGNELALPSKYVNFLYLASHYEKLKGSPEDNEQKQLFVEQHKHYLDEIIEQISEFSKRVILADANLDKVLSAYNKHRDKPIREQAENIIHLFTLTNLGAPAAFKYFDTTIDRKRYTSTKEVLDATLIHQSITGLYETRIDLSQLGGDGGGGSGGGEAAAKGGTLNIEDEHRLHETSKEPDVSLGSTWLSDFPQAWAETGGMGLAVRQAPLIIPLKATSTPVSIKQYPMSQEARLGIKPHIQRLLDQGILVPCQSPWNTPLLPVKKPGTNDYRPVQDLREVNKRVEDIHPTVPNPYNLLSGLPPSHQWYTVLDLKDAFFCLRLHPTSQPLFAFEWRDPEMGISGQLTWTRLPQGFKNSPTLFNEALHRDLADFRIQHPDLILLQYVDDLLLAATSELDCQQGTRALLQTLGNLGYRASAKKAQICQKQVKYLGYLLKEGQRWLTEARKETVMGQPTPKTPRQLREFLGTAGFCRLWIPGFAEMAAPLYPLTKPGTLFNWGPDQQKAYQEIKQALLTAPALGLPDLTKPFELFVDEKQGYAKGVLTQKLGPWRRPVAYLSKKLDPVAAGWPPCLRMVAAIAVLTKDAGKLTMGQPLVILAPHAVEALVKQPPDRWLSNARMTHYQALLLDTDRVQFGPVVALNPATLLPLPEEGLQHNCLDILAEAHGTRPDLTDQPLPDADHTWYTDGSSLLQEGQRKAGAAVTTETEVIWAKALPAGTSAQRAELIALTQALKMAEGKKLNVYTDSRYAFATAHIHGEIYRRRGWLTSEGKEIKNKDEILALLKALFLPKRLSIIHCPGHQKGHSAEARGNRMADQAARKAAITETPDTSTLLAGKRTADGSEFEKRTADGSEFESPKKKAKVE

SEQ ID NO: 2752 - protein, 2094 aa, synthetic construct
  source 1..2094: note = Description of Artificial Sequence: Synthetic polypeptide
MPAAKRVKLDGGDKKYSIGLDIGTNSVGWAVITDEYKVPSKKFKVLGNTDRHSIKKNLIGALLFDSGETAEATRLKRTARRRYTRRKNRICYLQEIFSNEMAKVDDSFFHRLEESFLVEEDKKHERHPIFGNIVDEVAYHEKYPTIYHLRKKLVDSTDKADLRLIYLALAHMIKFRGHFLIEGDLNPDNSDVDKLFIQLVQTYNQLFEENPINASGVDAKAILSARLSKSRRLENLIAQLPGEKKNGLFGNLIALSLGLTPNFKSNFDLAEDAKLQLSKDTYDDDLDNLLAQIGDQYADLFLAAKNLSDAILLSDILRVNTEITKAPLSASMIKRYDEHHQDLTLLKALVRQQLPEKYKEIFFDQSKNGYAGYIDGGASQEEFYKFIKPILEKMDGTEELLVKLNREDLLRKQRTFDNGSIPHQIHLGELHAILRRQEDFYPFLKDNREKIEKILTFRIPYYVGPLARGNSRFAWMTRKSEETITPWNFEEVVDKGASAQSFIERMTNFDKNLPNEKVLPKHSLLYEYFTVYNELTKVKYVTEGMRKPAFLSGEQKKAIVDLLFKTNRKVTVKQLKEDYFKKIECFDSVEISGVEDRFNASLGTYHDLLKIIKDKDFLDNEENEDILEDIVLTLTLFEDREMIEERLKTYAHLFDDKVMKQLKRRRYTGWGRLSRKLINGIRDKQSGKTILDFLKSDGFANRNFMQLIHDDSLTFKEDIQKAQVSGQGDSLHEHIANLAGSPAIKKGILQTVKVVDELVKVMGRHKPENIVIEMARENQTTQKGQKNSRERMKRIEEGIKELGSQILKEHPVENTQLQNEKLYLYYLQNGRDMYVDQELDINRLSDYDVDHIVPQSFLKDDSIDNKVLTRSDKARGKSDNVPSEEVVKKMKNYWRQLLNAKLITQRKFDNLTKAERGGLSELDKAGFIKRQLVETRQITKHVAQILDSRMNTKYDENDKLIREVKVITLKSKLVSDFRKDFQFYKVREINNYHHAHDAYLNAVVGTALIKKYPKLESEFVYGDYKVYDVRKMIAKSEQEIGKATAKYFFYSNIMNFFKTEITLANGEIRKRPLIETNGETGEIVWDKGRDFATVRKVLSMPQVNIVKKTEVQTGGFSKESILPKRNSDKLIARKKDWDPKKYGGFDSPTVAYSVLVVAKVEKGKSKKLKSVKELLGITIMERSSFEKNPIDFLEAKGYKEVKKDLIIKLPKYSLFELENGRKRMLASAGELQKGNELALPSKYVNFLYLASHYEKLKGSPEDNEQKQLFVEQHKHYLDEIIEQISEFSKRVILADANLDKVLSAYNKHRDKPIREQAENIIHLFTLTNLGAPAAFKYFDTTIDRKRYTSTKEVLDATLIHQSITGLYETRIDLSQLGGDGGGGSPAPGSSGGTLNIEDEHRLHETSKEPDVSLGSTWLSDFPQAWAETGGMGLAVRQAPLIIPLKATSTPVSIKQYPMSQEARLGIKPHIQRLLDQGILVPCQSPWNTPLLPVKKPGTNDYRPVQDLREVNKRVEDIHPTVPNPYNLLSGLPPSHQWYTVLDLKDAFFCLRLHPTSQPLFAFEWRDPEMGISGQLTWTRLPQGFKNSPTLFNEALHRDLADFRIQHPDLILLQYVDDLLLAATSELDCQQGTRALLQTLGNLGYRASAKKAQICQKQVKYLGYLLKEGQRWLTEARKETVMGQPTPKTPRQLREFLGTAGFCRLWIPGFAEMAAPLYPLTKPGTLFNWGPDQQKAYQEIKQALLTAPALGLPDLTKPFELFVDEKQGYAKGVLTQKLGPWRRPVAYLSKKLDPVAAGWPPCLRMVAAIAVLTKDAGKLTMGQPLVILAPHAVEALVKQPPDRWLSNARMTHYQALLLDTDRVQFGPVVALNPATLLPLPEEGLQHNCLDILAEAHGTRPDLTDQPLPDADHTWYTDGSSLLQEGQRKAGAAVTTETEVIWAKALPAGTSAQRAELIALTQALKMAEGKKLNVYTDSRYAFATAHIHGEIYRRRGWLTSEGKEIKNKDEILALLKALFLPKRLSIIHCPGHQKGHSAEARGNRMADQAARKAAITETPDTSTLLAGKRTADGSEFEKRTADGSEFESPKKKAKVE

SEQ ID NO: 2753 - protein, 2096 aa, synthetic construct
  source 1..2096: note = Description of Artificial Sequence: Synthetic polypeptide
MPAAKRVKLDGGDKKYSIGLDIGTNSVGWAVITDEYKVPSKKFKVLGNTDRHSIKKNLIGALLFDSGETAEATRLKRTARRRYTRRKNRICYLQEIFSNEMAKVDDSFFHRLEESFLVEEDKKHERHPIFGNIVDEVAYHEKYPTIYHLRKKLVDSTDKADLRLIYLALAHMIKFRGHFLIEGDLNPDNSDVDKLFIQLVQTYNQLFEENPINASGVDAKAILSARLSKSRRLENLIAQLPGEKKNGLFGNLIALSLGLTPNFKSNFDLAEDAKLQLSKDTYDDDLDNLLAQIGDQYADLFLAAKNLSDAILLSDILRVNTEITKAPLSASMIKRYDEHHQDLTLLKALVRQQLPEKYKEIFFDQSKNGYAGYIDGGASQEEFYKFIKPILEKMDGTEELLVKLNREDLLRKQRTFDNGSIPHQIHLGELHAILRRQEDFYPFLKDNREKIEKILTFRIPYYVGPLARGNSRFAWMTRKSEETITPWNFEEVVDKGASAQSFIERMTNFDKNLPNEKVLPKHSLLYEYFTVYNELTKVKYVTEGMRKPAFLSGEQKKAIVDLLFKTNRKVTVKQLKEDYFKKIECFDSVEISGVEDRFNASLGTYHDLLKIIKDKDFLDNEENEDILEDIVLTLTLFEDREMIEERLKTYAHLFDDKVMKQLKRRRYTGWGRLSRKLINGIRDKQSGKTILDFLKSDGFANRNFMQLIHDDSLTFKEDIQKAQVSGQGDSLHEHIANLAGSPAIKKGILQTVKVVDELVKVMGRHKPENIVIEMARENQTTQKGQKNSRERMKRIEEGIKELGSQILKEHPVENTQLQNEKLYLYYLQNGRDMYVDQELDINRLSDYDVDHIVPQSFLKDDSIDNKVLTRSDKARGKSDNVPSEEVVKKMKNYWRQLLNAKLITQRKFDNLTKAERGGLSELDKAGFIKRQLVETRQITKHVAQILDSRMNTKYDENDKLIREVKVITLKSKLVSDFRKDFQFYKVREINNYHHAHDAYLNAVVGTALIKKYPKLESEFVYGDYKVYDVRKMIAKSEQEIGKATAKYFFYSNIMNFFKTEITLANGEIRKRPLIETNGETGEIVWDKGRDFATVRKVLSMPQVNIVKKTEVQTGGFSKESILPKRNSDKLIARKKDWDPKKYGGFDSPTVAYSVLVVAKVEKGKSKKLKSVKELLGITIMERSSFEKNPIDFLEAKGYKEVKKDLIIKLPKYSLFELENGRKRMLASAGELQKGNELALPSKYVNFLYLASHYEKLKGSPEDNEQKQLFVEQHKHYLDEIIEQISEFSKRVILADANLDKVLSAYNKHRDKPIREQAENIIHLFTLTNLGAPAAFKYFDTTIDRKRYTSTKEVLDATLIHQSITGLYETRIDLSQLGGDGGPAPGGSEAAAKGGTLNIEDEHRLHETSKEPDVSLGSTWLSDFPQAWAETGGMGLAVRQAPLIIPLKATSTPVSIKQYPMSQEARLGIKPHIQRLLDQGILVPCQSPWNTPLLPVKKPGTNDYRPVQDLREVNKRVEDIHPTVPNPYNLLSGLPPSHQWYTVLDLKDAFFCLRLHPTSQPLFAFEWRDPEMGISGQLTWTRLPQGFKNSPTLFNEALHRDLADFRIQHPDLILLQYVDDLLLAATSELDCQQGTRALLQTLGNLGYRASAKKAQICQKQVKYLGYLLKEGQRWLTEARKETVMGQPTPKTPRQLREFLGTAGFCRLWIPGFAEMAAPLYPLTKPGTLFNWGPDQQKAYQEIKQALLTAPALGLPDLTKPFELFVDEKQGYAKGVLTQKLGPWRRPVAYLSKKLDPVAAGWPPCLRMVAAIAVLTKDAGKLTMGQPLVILAPHAVEALVKQPPDRWLSNARMTHYQALLLDTDRVQFGPVVALNPATLLPLPEEGLQHNCLDILAEAHGTRPDLTDQPLPDADHTWYTDGSSLLQEGQRKAGAAVTTETEVIWAKALPAGTSAQRAELIALTQALKMAEGKKLNVYTDSRYAFATAHIHGEIYRRRGWLTSEGKEIKNKDEILALLKALFLPKRLSIIHCPGHQKGHSAEARGNRMADQAARKAAITETPDTSTLLAGKRTADGSEFEKRTADGSEFESPKKKAKVE

SEQ ID NO: 2754 - protein, 2090 aa, synthetic construct
  source 1..2090: note = Description of Artificial Sequence: Synthetic polypeptide
MPAAKRVKLDGGDKKYSIGLDIGTNSVGWAVITDEYKVPSKKFKVLGNTDRHSIKKNLIGALLFDSGETAEATRLKRTARRRYTRRKNRICYLQEIFSNEMAKVDDSFFHRLEESFLVEEDKKHERHPIFGNIVDEVAYHEKYPTIYHLRKKLVDSTDKADLRLIYLALAHMIKFRGHFLIEGDLNPDNSDVDKLFIQLVQTYNQLFEENPINASGVDAKAILSARLSKSRRLENLIAQLPGEKKNGLFGNLIALSLGLTPNFKSNFDLAEDAKLQLSKDTYDDDLDNLLAQIGDQYADLFLAAKNLSDAILLSDILRVNTEITKAPLSASMIKRYDEHHQDLTLLKALVRQQLPEKYKEIFFDQSKNGYAGYIDGGASQEEFYKFIKPILEKMDGTEELLVKLNREDLLRKQRTFDNGSIPHQIHLGELHAILRRQEDFYPFLKDNREKIEKILTFRIPYYVGPLARGNSRFAWMTRKSEETITPWNFEEVVDKGASAQSFIERMTNFDKNLPNEKVLPKHSLLYEYFTVYNELTKVKYVTEGMRKPAFLSGEQKKAIVDLLFKTNRKVTVKQLKEDYFKKIECFDSVEISGVEDRFNASLGTYHDLLKIIKDKDFLDNEENEDILEDIVLTLTLFEDREMIEERLKTYAHLFDDKVMKQLKRRRYTGWGRLSRKLINGIRDKQSGKTILDFLKSDGFANRNFMQLIHDDSLTFKEDIQKAQVSGQGDSLHEHIANLAGSPAIKKGILQTVKVVDELVKVMGRHKPENIVIEMARENQTTQKGQKNSRERMKRIEEGIKELGSQILKEHPVENTQLQNEKLYLYYLQNGRDMYVDQELDINRLSDYDVDHIVPQSFLKDDSIDNKVLTRSDKARGKSDNVPSEEVVKKMKNYWRQLLNAKLITQRKFDNLTKAERGGLSELDKAGFIKRQLVETRQITKHVAQILDSRMNTKYDENDKLIREVKVITLKSKLVSDFRKDFQFYKVREINNYHHAHDAYLNAVVGTALIKKYPKLESEFVYGDYKVYDVRKMIAKSEQEIGKATAKYFFYSNIMNFFKTEITLANGEIRKRPLIETNGETGEIVWDKGRDFATVRKVLSMPQVNIVKKTEVQTGGFSKESILPKRNSDKLIARKKDWDPKKYGGFDSPTVAYSVLVVAKVEKGKSKKLKSVKELLGITIMERSSFEKNPIDFLEAKGYKEVKKDLIIKLPKYSLFELENGRKRMLASAGELQKGNELALPSKYVNFLYLASHYEKLKGSPEDNEQKQLFVEQHKHYLDEIIEQISEFSKRVILADANLDKVLSAYNKHRDKPIREQAENIIHLFTLTNLGAPAAFKYFDTTIDRKRYTSTKEVLDATLIHQSITGLYETRIDLSQLGGDGGGGGGSGGTLNIEDEHRLHETSKEPDVSLGSTWLSDFPQAWAETGGMGLAVRQAPLIIPLKATSTPVSIKQYPMSQEARLGIKPHIQRLLDQGILVPCQSPWNTPLLPVKKPGTNDYRPVQDLREVNKRVEDIHPTVPNPYNLLSGLPPSHQWYTVLDLKDAFFCLRLHPTSQPLFAFEWRDPEMGISGQLTWTRLPQGFKNSPTLFNEALHRDLADFRIQHPDLILLQYVDDLLLAATSELDCQQGTRALLQTLGNLGYRASAKKAQICQKQVKYLGYLLKEGQRWLTEARKETVMGQPTPKTPRQLREFLGTAGFCRLWIPGFAEMAAPLYPLTKPGTLFNWGPDQQKAYQEIKQALLTAPALGLPDLTKPFELFVDEKQGYAKGVLTQKLGPWRRPVAYLSKKLDPVAAGWPPCLRMVAAIAVLTKDAGKLTMGQPLVILAPHAVEALVKQPPDRWLSNARMTHYQALLLDTDRVQFGPVVALNPATLLPLPEEGLQHNCLDILAEAHGTRPDLTDQPLPDADHTWYTDGSSLLQEGQRKAGAAVTTETEVIWAKALPAGTSAQRAELIALTQALKMAEGKKLNVYTDSRYAFATAHIHGEIYRRRGWLTSEGKEIKNKDEILALLKALFLPKRLSIIHCPGHQKGHSAEARGNRMADQAARKAAITETPDTSTLLAGKRTADGSEFEKRTADGSEFESPKKKAKVE

SEQ ID NO: 2755 - protein, 2096 aa, synthetic construct
  source 1..2096: note = Description of Artificial Sequence: Synthetic polypeptide
MPAAKRVKLDGGDKKYSIGLDIGTNSVGWAVITDEYKVPSKKFKVLGNTDRHSIKKNLIGALLFDSGETAEATRLKRTARRRYTRRKNRICYLQEIFSNEMAKVDDSFFHRLEESFLVEEDKKHERHPIFGNIVDEVAYHEKYPTIYHLRKKLVDSTDKADLRLIYLALAHMIKFRGHFLIEGDLNPDNSDVDKLFIQLVQTYNQLFEENPINASGVDAKAILSARLSKSRRLENLIAQLPGEKKNGLFGNLIALSLGLTPNFKSNFDLAEDAKLQLSKDTYDDDLDNLLAQIGDQYADLFLAAKNLSDAILLSDILRVNTEITKAPLSASMIKRYDEHHQDLTLLKALVRQQLPEKYKEIFFDQSKNGYAGYIDGGASQEEFYKFIKPILEKMDGTEELLVKLNREDLLRKQRTFDNGSIPHQIHLGELHAILRRQEDFYPFLKDNREKIEKILTFRIPYYVGPLARGNSRFAWMTRKSEETITPWNFEEVVDKGASAQSFIERMTNFDKNLPNEKVLPKHSLLYEYFTVYNELTKVKYVTEGMRKPAFLSGEQKKAIVDLLFKTNRKVTVKQLKEDYFKKIECFDSVEISGVEDRFNASLGTYHDLLKIIKDKDFLDNEENEDILEDIVLTLTLFEDREMIEERLKTYAHLFDDKVMKQLKRRRYTGWGRLSRKLINGIRDKQSGKTILDFLKSDGFANRNFMQLIHDDSLTFKEDIQKAQVSGQGDSLHEHIANLAGSPAIKKGILQTVKVVDELVKVMGRHKPENIVIEMARENQTTQKGQKNSRERMKRIEEGIKELGSQILKEHPVENTQLQNEKLYLYYLQNGRDMYVDQELDINRLSDYDVDHIVPQSFLKDDSIDNKVLTRSDKARGKSDNVPSEEVVKKMKNYWRQLLNAKLITQRKFDNLTKAERGGLSELDKAGFIKRQLVETRQITKHVAQILDSRMNTKYDENDKLIREVKVITLKSKLVSDFRKDFQFYKVREINNYHHAHDAYLNAVVGTALIKKYPKLESEFVYGDYKVYDVRKMIAKSEQEIGKATAKYFFYSNIMNFFKTEITLANGEIRKRPLIETNGETGEIVWDKGRDFATVRKVLSMPQVNIVKKTEVQTGGFSKESILPKRNSDKLIARKKDWDPKKYGGFDSPTVAYSVLVVAKVEKGKSKKLKSVKELLGITIMERSSFEKNPIDFLEAKGYKEVKKDLIIKLPKYSLFELENGRKRMLASAGELQKGNELALPSKYVNFLYLASHYEKLKGSPEDNEQKQLFVEQHKHYLDEIIEQISEFSKRVILADANLDKVLSAYNKHRDKPIREQAENIIHLFTLTNLGAPAAFKYFDTTIDRKRYTSTKEVLDATLIHQSITGLYETRIDLSQLGGDGGEAAAKGGSPAPGGTLNIEDEHRLHETSKEPDVSLGSTWLSDFPQAWAETGGMGLAVRQAPLIIPLKATSTPVSIKQYPMSQEARLGIKPHIQRLLDQGILVPCQSPWNTPLLPVKKPGTNDYRPVQDLREVNKRVEDIHPTVPNPYNLLSGLPPSHQWYTVLDLKDAFFCLRLHPTSQPLFAFEWRDPEMGISGQLTWTRLPQGFKNSPTLFNEALHRDLADFRIQHPDLILLQYVDDLLLAATSELDCQQGTRALLQTLGNLGYRASAKKAQICQKQVKYLGYLLKEGQRWLTEARKETVMGQPTPKTPRQLREFLGTAGFCRLWIPGFAEMAAPLYPLTKPGTLFNWGPDQQKAYQEIKQALLTAPALGLPDLTKPFELFVDEKQGYAKGVLTQKLGPWRRPVAYLSKKLDPVAAGWPPCLRMVAAIAVLTKDAGKLTMGQPLVILAPHAVEALVKQPPDRWLSNARMTHYQALLLDTDRVQFGPVVALNPATLLPLPEEGLQHNCLDILAEAHGTRPDLTDQPLPDADHTWYTDGSSLLQEGQRKAGAAVTTETEVIWAKALPAGTSAQRAELIALTQALKMAEGKKLNVYTDSRYAFATAHIHGEIYRRRGWLTSEGKEIKNKDEILALLKALFLPKRLSIIHCPGHQKGHSAEARGNRMADQAARKAAITETPDTSTLLAGKRTADGSEFEKRTADGSEFESPKKKAKVE

SEQ ID NO: 2756 - protein, 2096 aa, synthetic construct
  source 1..2096: note = Description of Artificial Sequence: Synthetic polypeptide
MPAAKRVKLDGGDKKYSIGLDIGTNSVGWAVITDEYKVPSKKFKVLGNTDRHSIKKNLIGALLFDSGETAEATRLKRTARRRYTRRKNRICYLQEIFSNEMAKVDDSFFHRLEESFLVEEDKKHERHPIFGNIVDEVAYHEKYPTIYHLRKKLVDSTDKADLRLIYLALAHMIKFRGHFLIEGDLNPDNSDVDKLFIQLVQTYNQLFEENPINASGVDAKAILSARLSKSRRLENLIAQLPGEKKNGLFGNLIALSLGLTPNFKSNFDLAEDAKLQLSKDTYDDDLDNLLAQIGDQYADLFLAAKNLSDAILLSDILRVNTEITKAPLSASMIKRYDEHHQDLTLLKALVRQQLPEKYKEIFFDQSKNGYAGYIDGGASQEEFYKFIKPILEKMDGTEELLVKLNREDLLRKQRTFDNGSIPHQIHLGELHAILRRQEDFYPFLKDNREKIEKILTFRIPYYVGPLARGNSRFAWMTRKSEETITPWNFEEVVDKGASAQSFIERMTNFDKNLPNEKVLPKHSLLYEYFTVYNELTKVKYVTEGMRKPAFLSGEQKKAIVDLLFKTNRKVTVKQLKEDYFKKIECFDSVEISGVEDRFNASLGTYHDLLKIIKDKDFLDNEENEDILEDIVLTLTLFEDREMIEERLKTYAHLFDDKVMKQLKRRRYTGWGRLSRKLINGIRDKQSGKTILDFLKSDGFANRNFMQLIHDDSLTFKEDIQKAQVSGQGDSLHEHIANLAGSPAIKKGILQTVKVVDELVKVMGRHKPENIVIEMARENQTTQKGQKNSRERMKRIEEGIKELGSQILKEHPVENTQLQNEKLYLYYLQNGRDMYVDQELDINRLSDYDVDHIVPQSFLKDDSIDNKVLTRSDKARGKSDNVPSEEVVKKMKNYWRQLLNAKLITQRKFDNLTKAERGGLSELDKAGFIKRQLVETRQITKHVAQILDSRMNTKYDENDKLIREVKVITLKSKLVSDFRKDFQFYKVREINNYHHAHDAYLNAVVGTALIKKYPKLESEFVYGDYKVYDVRKMIAKSEQEIGKATAKYFFYSNIMNFFKTEITLANGEIRKRPLIETNGETGEIVWDKGRDFATVRKVLSMPQVNIVKKTEVQTGGFSKESILPKRNSDKLIARKKDWDPKKYGGFDSPTVAYSVLVVAKVEKGKSKKLKSVKELLGITIMERSSFEKNPIDFLEAKGYKEVKKDLIIKLPKYSLFELENGRKRMLASAGELQKGNELALPSKYVNFLYLASHYEKLKGSPEDNEQKQLFVEQHKHYLDEIIEQISEFSKRVILADANLDKVLSAYNKHRDKPIREQAENIIHLFTLTNLGAPAAFKYFDTTIDRKRYTSTKEVLDATLIHQSITGLYETRIDLSQLGGDGGPAPEAAAKGGSGGTLNIEDEHRLHETSKEPDVSLGSTWLSDFPQAWAETGGMGLAVRQAPLIIPLKATSTPVSIKQYPMSQEARLGIKPHIQRLLDQGILVPCQSPWNTPLLPVKKPGTNDYRPVQDLREVNKRVEDIHPTVPNPYNLLSGLPPSHQWYTVLDLKDAFFCLRLHPTSQPLFAFEWRDPEMGISGQLTWTRLPQGFKNSPTLFNEALHRDLADFRIQHPDLILLQYVDDLLLAATSELDCQQGTRALLQTLGNLGYRASAKKAQICQKQVKYLGYLLKEGQRWLTEARKETVMGQPTPKTPRQLREFLGTAGFCRLWIPGFAEMAAPLYPLTKPGTLFNWGPDQQKAYQEIKQALLTAPALGLPDLTKPFELFVDEKQGYAKGVLTQKLGPWRRPVAYLSKKLDPVAAGWPPCLRMVAAIAVLTKDAGKLTMGQPLVILAPHAVEALVKQPPDRWLSNARMTHYQALLLDTDRVQFGPVVALNPATLLPLPEEGLQHNCLDILAEAHGTRPDLTDQPLPDADHTWYTDGSSLLQEGQRKAGAAVTTETEVIWAKALPAGTSAQRAELIALTQALKMAEGKKLNVYTDSRYAFATAHIHGEIYRRRGWLTSEGKEIKNKDEILALLKALFLPKRLSIIHCPGHQKGHSAEARGNRMADQAARKAAITETPDTSTLLAGKRTADGSEFEKRTADGSEFESPKKKAKVE

SEQ ID NO: 2757 - protein, 2094 aa, synthetic construct
  source 1..2094: note = Description of Artificial Sequence: Synthetic polypeptide
MPAAKRVKLDGGDKKYSIGLDIGTNSVGWAVITDEYKVPSKKFKVLGNTDRHSIKKNLIGALLFDSGETAEATRLKRTARRRYTRRKNRICYLQEIFSNEMAKVDDSFFHRLEESFLVEEDKKHERHPIFGNIVDEVAYHEKYPTIYHLRKKLVDSTDKADLRLIYLALAHMIKFRGHFLIEGDLNPDNSDVDKLFIQLVQTYNQLFEENPINASGVDAKAILSARLSKSRRLENLIAQLPGEKKNGLFGNLIALSLGLTPNFKSNFDLAEDAKLQLSKDTYDDDLDNLLAQIGDQYADLFLAAKNLSDAILLSDILRVNTEITKAPLSASMIKRYDEHHQDLTLLKALVRQQLPEKYKEIFFDQSKNGYAGYIDGGASQEEFYKFIKPILEKMDGTEELLVKLNREDLLRKQRTFDNGSIPHQIHLGELHAILRRQEDFYPFLKDNREKIEKILTFRIPYYVGPLARGNSRFAWMTRKSEETITPWNFEEVVDKGASAQSFIERMTNFDKNLPNEKVLPKHSLLYEYFTVYNELTKVKYVTEGMRKPAFLSGEQKKAIVDLLFKTNRKVTVKQLKEDYFKKIECFDSVEISGVEDRFNASLGTYHDLLKIIKDKDFLDNEENEDILEDIVLTLTLFEDREMIEERLKTYAHLFDDKVMKQLKRRRYTGWGRLSRKLINGIRDKQSGKTILDFLKSDGFANRNFMQLIHDDSLTFKEDIQKAQVSGQGDSLHEHIANLAGSPAIKKGILQTVKVVDELVKVMGRHKPENIVIEMARENQTTQKGQKNSRERMKRIEEGIKELGSQILKEHPVENTQLQNEKLYLYYLQNGRDMYVDQELDINRLSDYDVDHIVPQSFLKDDSIDNKVLTRSDKARGKSDNVPSEEVVKKMKNYWRQLLNAKLITQRKFDNLTKAERGGLSELDKAGFIKRQLVETRQITKHVAQILDSRMNTKYDENDKLIREVKVITLKSKLVSDFRKDFQFYKVREINNYHHAHDAYLNAVVGTALIKKYPKLESEFVYGDYKVYDVRKMIAKSEQEIGKATAKYFFYSNIMNFFKTEITLANGEIRKRPLIETNGETGEIVWDKGRDFATVRKVLSMPQVNIVKKTEVQTGGFSKESILPKRNSDKLIARKKDWDPKKYGGFDSPTVAYSVLVVAKVEKGKSKKLKSVKELLGITIMERSSFEKNPIDFLEAKGYKEVKKDLIIKLPKYSLFELENGRKRMLASAGELQKGNELALPSKYVNFLYLASHYEKLKGSPEDNEQKQLFVEQHKHYLDEIIEQISEFSKRVILADANLDKVLSAYNKHRDKPIREQAENIIHLFTLTNLGAPAAFKYFDTTIDRKRYTSTKEVLDATLIHQSITGLYETRIDLSQLGGDGGPAPGSSGGSGGTLNIEDEHRLHETSKEPDVSLGSTWLSDFPQAWAETGGMGLAVRQAPLIIPLKATSTPVSIKQYPMSQEARLGIKPHIQRLLDQGILVPCQSPWNTPLLPVKKPGTNDYRPVQDLREVNKRVEDIHPTVPNPYNLLSGLPPSHQWYTVLDLKDAFFCLRLHPTSQPLFAFEWRDPEMGISGQLTWTRLPQGFKNSPTLFNEALHRDLADFRIQHPDLILLQYVDDLLLAATSELDCQQGTRALLQTLGNLGYRASAKKAQICQKQVKYLGYLLKEGQRWLTEARKETVMGQPTPKTPRQLREFLGTAGFCRLWIPGFAEMAAPLYPLTKPGTLFNWGPDQQKAYQEIKQALLTAPALGLPDLTKPFELFVDEKQGYAKGVLTQKLGPWRRPVAYLSKKLDPVAAGWPPCLRMVAAIAVLTKDAGKLTMGQPLVILAPHAVEALVKQPPDRWLSNARMTHYQALLLDTDRVQFGPVVALNPATLLPLPEEGLQHNCLDILAEAHGTRPDLTDQPLPDADHTWYTDGSSLLQEGQRKAGAAVTTETEVIWAKALPAGTSAQRAELIALTQALKMAEGKKLNVYTDSRYAFATAHIHGEIYRRRGWLTSEGKEIKNKDEILALLKALFLPKRLSIIHCPGHQKGHSAEARGNRMADQAARKAAITETPDTSTLLAGKRTADGSEFEKRTADGSEFESPKKKAKVE

SEQ ID NO: 2758 - protein, 2096 aa, synthetic construct
  source 1..2096: note = Description of Artificial Sequence: Synthetic polypeptide
MPAAKRVKLDGGDKKYSIGLDIGTNSVGWAVITDEYKVPSKKFKVLGNTDRHSIKKNLIGALLFDSGETAEATRLKRTARRRYTRRKNRICYLQEIFSNEMAKVDDSFFHRLEESFLVEEDKKHERHPIFGNIVDEVAYHEKYPTIYHLRKKLVDSTDKADLRLIYLALAHMIKFRGHFLIEGDLNPDNSDVDKLFIQLVQTYNQLFEENPINASGVDAKAILSARLSKSRRLENLIAQLPGEKKNGLFGNLIALSLGLTPNFKSNFDLAEDAKLQLSKDTYDDDLDNLLAQIGDQYADLFLAAKNLSDAILLSDILRVNTEITKAPLSASMIKRYDEHHQDLTLLKALVRQQLPEKYKEIFFDQSKNGYAGYIDGGASQEEFYKFIKPILEKMDGTEELLVKLNREDLLRKQRTFDNGSIPHQIHLGELHAILRRQEDFYPFLKDNREKIEKILTFRIPYYVGPLARGNSRFAWMTRKSEETITPWNFEEVVDKGASAQSFIERMTNFDKNLPNEKVLPKHSLLYEYFTVYNELTKVKYVTEGMRKPAFLSGEQKKAIVDLLFKTNRKVTVKQLKEDYFKKIECFDSVEISGVEDRFNASLGTYHDLLKIIKDKDFLDNEENEDILEDIVLTLTLFEDREMIEERLKTYAHLFDDKVMKQLKRRRYTGWGRLSRKLINGIRDKQSGKTILDFLKSDGFANRNFMQLIHDDSLTFKEDIQKAQVSGQGDSLHEHIANLAGSPAIKKGILQTVKVVDELVKVMGRHKPENIVIEMARENQTTQKGQKNSRERMKRIEEGIKELGSQILKEHPVENTQLQNEKLYLYYLQNGRDMYVDQELDINRLSDYDVDHIVPQSFLKDDSIDNKVLTRSDKARGKSDNVPSEEVVKKMKNYWRQLLNAKLITQRKFDNLTKAERGGLSELDKAGFIKRQLVETRQITKHVAQILDSRMNTKYDENDKLIREVKVITLKSKLVSDFRKDFQFYKVREINNYHHAHDAYLNAVVGTALIKKYPKLESEFVYGDYKVYDVRKMIAKSEQEIGKATAKYFFYSNIMNFFKTEITLANGEIRKRPLIETNGETGEIVWDKGRDFATVRKVLSMPQVNIVKKTEVQTGGFSKESILPKRNSDKLIARKKDWDPKKYGGFDSPTVAYSVLVVAKVEKGKSKKLKSVKELLGITIMERSSFEKNPIDFLEAKGYKEVKKDLIIKLPKYSLFELENGRKRMLASAGELQKGNELALPSKYVNFLYLASHYEKLKGSPEDNEQKQLFVEQHKHYLDEIIEQISEFSKRVILADANLDKVLSAYNKHRDKPIREQAENIIHLFTLTNLGAPAAFKYFDTTIDRKRYTSTKEVLDATLIHQSITGLYETRIDLSQLGGDGGGSSPAPEAAAKGGTLNIEDEHRLHETSKEPDVSLGSTWLSDFPQAWAETGGMGLAVRQAPLIIPLKATSTPVSIKQYPMSQEARLGIKPHIQRLLDQGILVPCQSPWNTPLLPVKKPGTNDYRPVQDLREVNKRVEDIHPTVPNPYNLLSGLPPSHQWYTVLDLKDAFFCLRLHPTSQPLFAFEWRDPEMGISGQLTWTRLPQGFKNSPTLFNEALHRDLADFRIQHPDLILLQYVDDLLLAATSELDCQQGTRALLQTLGNLGYRASAKKAQICQKQVKYLGYLLKEGQRWLTEARKETVMGQPTPKTPRQLREFLGTAGFCRLWIPGFAEMAAPLYPLTKPGTLFNWGPDQQKAYQEIKQALLTAPALGLPDLTKPFELFVDEKQGYAKGVLTQKLGPWRRPVAYLSKKLDPVAAGWPPCLRMVAAIAVLTKDAGKLTMGQPLVILAPHAVEALVKQPPDRWLSNARMTHYQALLLDTDRVQFGPVVALNPATLLPLPEEGLQHNCLDILAEAHGTRPDLTDQPLPDADHTWYTDGSSLLQEGQRKAGAAVTTETEVIWAKALPAGTSAQRAELIALTQALKMAEGKKLNVYTDSRYAFATAHIHGEIYRRRGWLTSEGKEIKNKDEILALLKALFLPKRLSIIHCPGHQKGHSAEARGNRMADQAARKAAITETPDTSTLLAGKRTADGSEFEKRTADGSEFESPKKKAKVE

SEQ ID NO: 2759 - protein, 2096 aa, synthetic construct
  source 1..2096: note = Description of Artificial Sequence: Synthetic polypeptide
MPAAKRVKLDGGDKKYSIGLDIGTNSVGWAVITDEYKVPSKKFKVLGNTDRHSIKKNLIGALLFDSGETAEATRLKRTARRRYTRRKNRICYLQEIFSNEMAKVDDSFFHRLEESFLVEEDKKHERHPIFGNIVDEVAYHEKYPTIYHLRKKLVDSTDKADLRLIYLALAHMIKFRGHFLIEGDLNPDNSDVDKLFIQLVQTYNQLFEENPINASGVDAKAILSARLSKSRRLENLIAQLPGEKKNGLFGNLIALSLGLTPNFKSNFDLAEDAKLQLSKDTYDDDLDNLLAQIGDQYADLFLAAKNLSDAILLSDILRVNTEITKAPLSASMIKRYDEHHQDLTLLKALVRQQLPEKYKEIFFDQSKNGYAGYIDGGASQEEFYKFIKPILEKMDGTEELLVKLNREDLLRKQRTFDNGSIPHQIHLGELHAILRRQEDFYPFLKDNREKIEKILTFRIPYYVGPLARGNSRFAWMTRKSEETITPWNFEEVVDKGASAQSFIERMTNFDKNLPNEKVLPKHSLLYEYFTVYNELTKVKYVTEGMRKPAFLSGEQKKAIVDLLFKTNRKVTVKQLKEDYFKKIECFDSVEISGVEDRFNASLGTYHDLLKIIKDKDFLDNEENEDILEDIVLTLTLFEDREMIEERLKTYAHLFDDKVMKQLKRRRYTGWGRLSRKLINGIRDKQSGKTILDFLKSDGFANRNFMQLIHDDSLTFKEDIQKAQVSGQGDSLHEHIANLAGSPAIKKGILQTVKVVDELVKVMGRHKPENIVIEMARENQTTQKGQKNSRERMKRIEEGIKELGSQILKEHPVENTQLQNEKLYLYYLQNGRDMYVDQELDINRLSDYDVDHIVPQSFLKDDSIDNKVLTRSDKARGKSDNVPSEEVVKKMKNYWRQLLNAKLITQRKFDNLTKAERGGLSELDKAGFIKRQLVETRQITKHVAQILDSRMNTKYDENDKLIREVKVITLKSKLVSDFRKDFQFYKVREINNYHHAHDAYLNAVVGTALIKKYPKLESEFVYGDYKVYDVRKMIAKSEQEIGKATAKYFFYSNIMNFFKTEITLANGEIRKRPLIETNGETGEIVWDKGRDFATVRKVLSMPQVNIVKKTEVQTGGFSKESILPKRNSDKLIARKKDWDPKKYGGFDSPTVAYSVLVVAKVEKGKSKKLKSVKELLGITIMERSSFEKNPIDFLEAKGYKEVKKDLIIKLPKYSLFELENGRKRMLASAGELQKGNELALPSKYVNFLYLASHYEKLKGSPEDNEQKQLFVEQHKHYLDEIIEQISEFSKRVILADANLDKVLSAYNKHRDKPIREQAENIIHLFTLTNLGAPAAFKYFDTTIDRKRYTSTKEVLDATLIHQSITGLYETRIDLSQLGGDGGPAPEAAAKGSSGGTLNIEDEHRLHETSKEPDVSLGSTWLSDFPQAWAETGGMGLAVRQAPLIIPLKATSTPVSIKQYPMSQEARLGIKPHIQRLLDQGILVPCQSPWNTPLLPVKKPGTNDYRPVQDLREVNKRVEDIHPTVPNPYNLLSGLPPSHQWYTVLDLKDAFFCLRLHPTSQPLFAFEWRDPEMGISGQLTWTRLPQGFKNSPTLFNEALHRDLADFRIQHPDLILLQYVDDLLLAATSELDCQQGTRALLQTLGNLGYRASAKKAQICQKQVKYLGYLLKEGQRWLTEARKETVMGQPTPKTPRQLREFLGTAGFCRLWIPGFAEMAAPLYPLTKPGTLFNWGPDQQKAYQEIKQALLTAPALGLPDLTKPFELFVDEKQGYAKGVLTQKLGPWRRPVAYLSKKLDPVAAGWPPCLRMVAAIAVLTKDAGKLTMGQPLVILAPHAVEALVKQPPDRWLSNARMTHYQALLLDTDRVQFGPVVALNPATLLPLPEEGLQHNCLDILAEAHGTRPDLTDQPLPDADHTWYTDGSSLLQEGQRKAGAAVTTETEVIWAKALPAGTSAQRAELIALTQALKMAEGKKLNVYTDSRYAFATAHIHGEIYRRRGWLTSEGKEIKNKDEILALLKALFLPKRLSIIHCPGHQKGHSAEARGNRMADQAARKAAITETPDTSTLLAGKRTADGSEFEKRTADGSEFESPKKKAKVE

SEQ ID NO: 2760 - protein, 2096 aa, synthetic construct
  source 1..2096: note = Description of Artificial Sequence: Synthetic polypeptide
MPAAKRVKLDGGDKKYSIGLDIGTNSVGWAVITDEYKVPSKKFKVLGNTDRHSIKKNLIGALLFDSGETAEATRLKRTARRRYTRRKNRICYLQEIFSNEMAKVDDSFFHRLEESFLVEEDKKHERHPIFGNIVDEVAYHEKYPTIYHLRKKLVDSTDKADLRLIYLALAHMIKFRGHFLIEGDLNPDNSDVDKLFIQLVQTYNQLFEENPINASGVDAKAILSARLSKSRRLENLIAQLPGEKKNGLFGNLIALSLGLTPNFKSNFDLAEDAKLQLSKDTYDDDLDNLLAQIGDQYADLFLAAKNLSDAILLSDILRVNTEITKAPLSASMIKRYDEHHQDLTLLKALVRQQLPEKYKEIFFDQSKNGYAGYIDGGASQEEFYKFIKPILEKMDGTEELLVKLNREDLLRKQRTFDNGSIPHQIHLGELHAILRRQEDFYPFLKDNREKIEKILTFRIPYYVGPLARGNSRFAWMTRKSEETITPWNFEEVVDKGASAQSFIERMTNFDKNLPNEKVLPKHSLLYEYFTVYNELTKVKYVTEGMRKPAFLSGEQKKAIVDLLFKTNRKVTVKQLKEDYFKKIECFDSVEISGVEDRFNASLGTYHDLLKIIKDKDFLDNEENEDILEDIVLTLTLFEDREMIEERLKTYAHLFDDKVMKQLKRRRYTGWGRLSRKLINGIRDKQSGKTILDFLKSDGFANRNFMQLIHDDSLTFKEDIQKAQVSGQGDSLHEHIANLAGSPAIKKGILQTVKVVDELVKVMGRHKPENIVIEMARENQTTQKGQKNSRERMKRIEEGIKELGSQILKEHPVENTQLQNEKLYLYYLQNGRDMYVDQELDINRLSDYDVDHIVPQSFLKDDSIDNKVLTRSDKARGKSDNVPSEEVVKKMKNYWRQLLNAKLITQRKFDNLTKAERGGLSELDKAGFIKRQLVETRQITKHVAQILDSRMNTKYDENDKLIREVKVITLKSKLVSDFRKDFQFYKVREINNYHHAHDAYLNAVVGTALIKKYPKLESEFVYGDYKVYDVRKMIAKSEQEIGKATAKYFFYSNIMNFFKTEITLANGEIRKRPLIETNGETGEIVWDKGRDFATVRKVLSMPQVNIVKKTEVQTGGFSKESILPKRNSDKLIARKKDWDPKKYGGFDSPTVAYSVLVVAKVEKGKSKKLKSVKELLGITIMERSSFEKNPIDFLEAKGYKEVKKDLIIKLPKYSLFELENGRKRMLASAGELQKGNELALPSKYVNFLYLASHYEKLKGSPEDNEQKQLFVEQHKHYLDEIIEQISEFSKRVILADANLDKVLSAYNKHRDKPIREQAENIIHLFTLTNLGAPAAFKYFDTTIDRKRYTSTKEVLDATLIHQSITGLYETRIDLSQLGGDGGGSSGGSEAAAKGGTLNIEDEHRLHETSKEPDVSLGSTWLSDFPQAWAETGGMGLAVRQAPLIIPLKATSTPVSIKQYPMSQEARLGIKPHIQRLLDQGILVPCQSPWNTPLLPVKKPGTNDYRPVQDLREVNKRVEDIHPTVPNPYNLLSGLPPSHQWYTVLDLKDAFFCLRLHPTSQPLFAFEWRDPEMGISGQLTWTRLPQGFKNSPTLFNEALHRDLADFRIQHPDLILLQYVDDLLLAATSELDCQQGTRALLQTLGNLGYRASAKKAQICQKQVKYLGYLLKEGQRWLTEARKETVMGQPTPKTPRQLREFLGTAGFCRLWIPGFAEMAAPLYPLTKPGTLFNWGPDQQKAYQEIKQALLTAPALGLPDLTKPFELFVDEKQGYAKGVLTQKLGPWRRPVAYLSKKLDPVAAGWPPCLRMVAAIAVLTKDAGKLTMGQPLVILAPHAVEALVKQPPDRWLSNARMTHYQALLLDTDRVQFGPVVALNPATLLPLPEEGLQHNCLDILAEAHGTRPDLTDQPLPDADHTWYTDGSSLLQEGQRKAGAAVTTETEVIWAKALPAGTSAQRAELIALTQALKMAEGKKLNVYTDSRYAFATAHIHGEIYRRRGWLTSEGKEIKNKDEILALLKALFLPKRLSIIHCPGHQKGHSAEARGNRMADQAARKAAITETPDTSTLLAGKRTADGSEFEKRTADGSEFESPKKKAKVE

SEQ ID NO: 2761 - protein, 2096 aa, synthetic construct
  source 1..2096: note = Description of Artificial Sequence: Synthetic polypeptide
MPAAKRVKLDGGDKKYSIGLDIGTNSVGWAVITDEYKVPSKKFKVLGNTDRHSIKKNLIGALLFDSGETAEATRLKRTARRRYTRRKNRICYLQEIFSNEMAKVDDSFFHRLEESFLVEEDKKHERHPIFGNIVDEVAYHEKYPTIYHLRKKLVDSTDKADLRLIYLALAHMIKFRGHFLIEGDLNPDNSDVDKLFIQLVQTYNQLFEENPINASGVDAKAILSARLSKSRRLENLIAQLPGEKKNGLFGNLIALSLGLTPNFKSNFDLAEDAKLQLSKDTYDDDLDNLLAQIGDQYADLFLAAKNLSDAILLSDILRVNTEITKAPLSASMIKRYDEHHQDLTLLKALVRQQLPEKYKEIFFDQSKNGYAGYIDGGASQEEFYKFIKPILEKMDGTEELLVKLNREDLLRKQRTFDNGSIPHQIHLGELHAILRRQEDFYPFLKDNREKIEKILTFRIPYYVGPLARGNSRFAWMTRKSEETITPWNFEEVVDKGASAQSFIERMTNFDKNLPNEKVLPKHSLLYEYFTVYNELTKVKYVTEGMRKPAFLSGEQKKAIVDLLFKTNRKVTVKQLKEDYFKKIECFDSVEISGVEDRFNASLGTYHDLLKIIKDKDFLDNEENEDILEDIVLTLTLFEDREMIEERLKTYAHLFDDKVMKQLKRRRYTGWGRLSRKLINGIRDKQSGKTILDFLKSDGFANRNFMQLIHDDSLTFKEDIQKAQVSGQGDSLHEHIANLAGSPAIKKGILQTVKVVDELVKVMGRHKPENIVIEMARENQTTQKGQKNSRERMKRIEEGIKELGSQILKEHPVENTQLQNEKLYLYYLQNGRDMYVDQELDINRLSDYDVDHIVPQSFLKDDSIDNKVLTRSDKARGKSDNVPSEEVVKKMKNYWRQLLNAKLITQRKFDNLTKAERGGLSELDKAGFIKRQLVETRQITKHVAQILDSRMNTKYDENDKLIREVKVITLKSKLVSDFRKDFQFYKVREINNYHHAHDAYLNAVVGTALIKKYPKLESEFVYGDYKVYDVRKMIAKSEQEIGKATAKYFFYSNIMNFFKTEITLANGEIRKRPLIETNGETGEIVWDKGRDFATVRKVLSMPQVNIVKKTEVQTGGFSKESILPKRNSDKLIARKKDWDPKKYGGFDSPTVAYSVLVVAKVEKGKSKKLKSVKELLGITIMERSSFEKNPIDFLEAKGYKEVKKDLIIKLPKYSLFELENGRKRMLASAGELQKGNELALPSKYVNFLYLASHYEKLKGSPEDNEQKQLFVEQHKHYLDEIIEQISEFSKRVILADANLDKVLSAYNKHRDKPIREQAENIIHLFTLTNLGAPAAFKYFDTTIDRKRYTSTKEVLDATLIHQSITGLYETRIDLSQLGGDGGGGSEAAAKGSSGGTLNIEDEHRLHETSKEPDVSLGSTWLSDFPQAWAETGGMGLAVRQAPLIIPLKATSTPVSIKQYPMSQEARLGIKPHIQRLLDQGILVPCQSPWNTPLLPVKKPGTNDYRPVQDLREVNKRVEDIHPTVPNPYNLLSGLPPSHQWYTVLDLKDAFFCLRLHPTSQPLFAFEWRDPEMGISGQLTWTRLPQGFKNSPTLFNEALHRDLADFRIQHPDLILLQYVDDLLLAATSELDCQQGTRALLQTLGNLGYRASAKKAQICQKQVKYLGYLLKEGQRWLTEARKETVMGQPTPKTPRQLREFLGTAGFCRLWIPGFAEMAAPLYPLTKPGTLFNWGPDQQKAYQEIKQALLTAPALGLPDLTKPFELFVDEKQGYAKGVLTQKLGPWRRPVAYLSKKLDPVAAGWPPCLRMVAAIAVLTKDAGKLTMGQPLVILAPHAVEALVKQPPDRWLSNARMTHYQALLLDTDRVQFGPVVALNPATLLPLPEEGLQHNCLDILAEAHGTRPDLTDQPLPDADHTWYTDGSSLLQEGQRKAGAAVTTETEVIWAKALPAGTSAQRAELIALTQALKMAEGKKLNVYTDSRYAFATAHIHGEIYRRRGWLTSEGKEIKNKDEILALLKALFLPKRLSIIHCPGHQKGHSAEARGNRMADQAARKAAITETPDTSTLLAGKRTADGSEFEKRTADGSEFESPKKKAKVE

SEQ ID NO: 2762 - protein, 2094 aa, synthetic construct
  source 1..2094: note = Description of Artificial Sequence: Synthetic polypeptide
MPAAKRVKLDGGDKKYSIGLDIGTNSVGWAVITDEYKVPSKKFKVLGNTDRHSIKKNLIGALLFDSGETAEATRLKRTARRRYTRRKNRICYLQEIFSNEMAKVDDSFFHRLEESFLVEEDKKHERHPIFGNIVDEVAYHEKYPTIYHLRKKLVDSTDKADLRLIYLALAHMIKFRGHFLIEGDLNPDNSDVDKLFIQLVQTYNQLFEENPINASGVDAKAILSARLSKSRRLENLIAQLPGEKKNGLFGNLIALSLGLTPNFKSNFDLAEDAKLQLSKDTYDDDLDNLLAQIGDQYADLFLAAKNLSDAILLSDILRVNTEITKAPLSASMIKRYDEHHQDLTLLKALVRQQLPEKYKEIFFDQSKNGYAGYIDGGASQEEFYKFIKPILEKMDGTEELLVKLNREDLLRKQRTFDNGSIPHQIHLGELHAILRRQEDFYPFLKDNREKIEKILTFRIPYYVGPLARGNSRFAWMTRKSEETITPWNFEEVVDKGASAQSFIERMTNFDKNLPNEKVLPKHSLLYEYFTVYNELTKVKYVTEGMRKPAFLSGEQKKAIVDLLFKTNRKVTVKQLKEDYFKKIECFDSVEISGVEDRFNASLGTYHDLLKIIKDKDFLDNEENEDILEDIVLTLTLFEDREMIEERLKTYAHLFDDKVMKQLKRRRYTGWGRLSRKLINGIRDKQSGKTILDFLKSDGFANRNFMQLIHDDSLTFKEDIQKAQVSGQGDSLHEHIANLAGSPAIKKGILQTVKVVDELVKVMGRHKPENIVIEMARENQTTQKGQKNSRERMKRIEEGIKELGSQILKEHPVENTQLQNEKLYLYYLQNGRDMYVDQELDINRLSDYDVDHIVPQSFLKDDSIDNKVLTRSDKARGKSDNVPSEEVVKKMKNYWRQLLNAKLITQRKFDNLTKAERGGLSELDKAGFIKRQLVETRQITKHVAQILDSRMNTKYDENDKLIREVKVITLKSKLVSDFRKDFQFYKVREINNYHHAHDAYLNAVVGTALIKKYPKLESEFVYGDYKVYDVRKMIAKSEQEIGKATAKYFFYSNIMNFFKTEITLANGEIRKRPLIETNGETGEIVWDKGRDFATVRKVLSMPQVNIVKKTEVQTGGFSKESILPKRNSDKLIARKKDWDPKKYGGFDSPTVAYSVLVVAKVEKGKSKKLKSVKELLGITIMERSSFEKNPIDFLEAKGYKEVKKDLIIKLPKYSLFELENGRKRMLASAGELQKGNELALPSKYVNFLYLASHYEKLKGSPEDNEQKQLFVEQHKHYLDEIIEQISEFSKRVILADANLDKVLSAYNKHRDKPIREQAENIIHLFTLTNLGAPAAFKYFDTTIDRKRYTSTKEVLDATLIHQSITGLYETRIDLSQLGGDGGGGSPAPGGGGGTLNIEDEHRLHETSKEPDVSLGSTWLSDFPQAWAETGGMGLAVRQAPLIIPLKATSTPVSIKQYPMSQEARLGIKPHIQRLLDQGILVPCQSPWNTPLLPVKKPGTNDYRPVQDLREVNKRVEDIHPTVPNPYNLLSGLPPSHQWYTVLDLKDAFFCLRLHPTSQPLFAFEWRDPEMGISGQLTWTRLPQGFKNSPTLFNEALHRDLADFRIQHPDLILLQYVDDLLLAATSELDCQQGTRALLQTLGNLGYRASAKKAQICQKQVKYLGYLLKEGQRWLTEARKETVMGQPTPKTPRQLREFLGTAGFCRLWIPGFAEMAAPLYPLTKPGTLFNWGPDQQKAYQEIKQALLTAPALGLPDLTKPFELFVDEKQGYAKGVLTQKLGPWRRPVAYLSKKLDPVAAGWPPCLRMVAAIAVLTKDAGKLTMGQPLVILAPHAVEALVKQPPDRWLSNARMTHYQALLLDTDRVQFGPVVALNPATLLPLPEEGLQHNCLDILAEAHGTRPDLTDQPLPDADHTWYTDGSSLLQEGQRKAGAAVTTETEVIWAKALPAGTSAQRAELIALTQALKMAEGKKLNVYTDSRYAFATAHIHGEIYRRRGWLTSEGKEIKNKDEILALLKALFLPKRLSIIHCPGHQKGHSAEARGNRMADQAARKAAITETPDTSTLLAGKRTADGSEFEKRTADGSEFESPKKKAKVE

SEQ ID NO: 2763 - protein, 2097 aa, synthetic construct
  source 1..2097: note = Description of Artificial Sequence: Synthetic polypeptide
MPAAKRVKLDGGDKKYSIGLDIGTNSVGWAVITDEYKVPSKKFKVLGNTDRHSIKKNLIGALLFDSGETAEATRLKRTARRRYTRRKNRICYLQEIFSNEMAKVDDSFFHRLEESFLVEEDKKHERHPIFGNIVDEVAYHEKYPTIYHLRKKLVDSTDKADLRLIYLALAHMIKFRGHFLIEGDLNPDNSDVDKLFIQLVQTYNQLFEENPINASGVDAKAILSARLSKSRRLENLIAQLPGEKKNGLFGNLIALSLGLTPNFKSNFDLAEDAKLQLSKDTYDDDLDNLLAQIGDQYADLFLAAKNLSDAILLSDILRVNTEITKAPLSASMIKRYDEHHQDLTLLKALVRQQLPEKYKEIFFDQSKNGYAGYIDGGASQEEFYKFIKPILEKMDGTEELLVKLNREDLLRKQRTFDNGSIPHQIHLGELHAILRRQEDFYPFLKDNREKIEKILTFRIPYYVGPLARGNSRFAWMTRKSEETITPWNFEEVVDKGASAQSFIERMTNFDKNLPNEKVLPKHSLLYEYFTVYNELTKVKYVTEGMRKPAFLSGEQKKAIVDLLFKTNRKVTVKQLKEDYFKKIECFDSVEISGVEDRFNASLGTYHDLLKIIKDKDFLDNEENEDILEDIVLTLTLFEDREMIEERLKTYAHLFDDKVMKQLKRRRYTGWGRLSRKLINGIRDKQSGKTILDFLKSDGFANRNFMQLIHDDSLTFKEDIQKAQVSGQGDSLHEHIANLAGSPAIKKGILQTVKVVDELVKVMGRHKPENIVIEMARENQTTQKGQKNSRERMKRIEEGIKELGSQILKEHPVENTQLQNEKLYLYYLQNGRDMYVDQELDINRLSDYDVDHIVPQSFLKDDSIDNKVLTRSDKARGKSDNVPSEEVVKKMKNYWRQLLNAKLITQRKFDNLTKAERGGLSELDKAGFIKRQLVETRQITKHVAQILDSRMNTKYDENDKLIREVKVITLKSKLVSDFRKDFQFYKVREINNYHHAHDAYLNAVVGTALIKKYPKLESEFVYGDYKVYDVRKMIAKSEQEIGKATAKYFFYSNIMNFFKTEITLANGEIRKRPLIETNGETGEIVWDKGRDFATVRKVLSMPQVNIVKKTEVQTGGFSKESILPKRNSDKLIARKKDWDPKKYGGFDSPTVAYSVLVVAKVEKGKSKKLKSVKELLGITIMERSSFEKNPIDFLEAKGYKEVKKDLIIKLPKYSLFELENGRKRMLASAGELQKGNELALPSKYVNFLYLASHYEKLKGSPEDNEQKQLFVEQHKHYLDEIIEQISEFSKRVILADANLDKVLSAYNKHRDKPIREQAENIIHLFTLTNLGAPAAFKYFDTTIDRKRYTSTKEVLDATLIHQSITGLYETRIDLSQLGGDGGGGSGGSGGSGGSGGTLNIEDEHRLHETSKEPDVSLGSTWLSDFPQAWAETGGMGLAVRQAPLIIPLKATSTPVSIKQYPMSQEARLGIKPHIQRLLDQGILVPCQSPWNTPLLPVKKPGTNDYRPVQDLREVNKRVEDIHPTVPNPYNLLSGLPPSHQWYTVLDLKDAFFCLRLHPTSQPLFAFEWRDPEMGISGQLTWTRLPQGFKNSPTLFNEALHRDLADFRIQHPDLILLQYVDDLLLAATSELDCQQGTRALLQTLGNLGYRASAKKAQICQKQVKYLGYLLKEGQRWLTEARKETVMGQPTPKTPRQLREFLGTAGFCRLWIPGFAEMAAPLYPLTKPGTLFNWGPDQQKAYQEIKQALLTAPALGLPDLTKPFELFVDEKQGYAKGVLTQKLGPWRRPVAYLSKKLDPVAAGWPPCLRMVAAIAVLTKDAGKLTMGQPLVILAPHAVEALVKQPPDRWLSNARMTHYQALLLDTDRVQFGPVVALNPATLLPLPEEGLQHNCLDILAEAHGTRPDLTDQPLPDADHTWYTDGSSLLQEGQRKAGAAVTTETEVIWAKALPAGTSAQRAELIALTQALKMAEGKKLNVYTDSRYAFATAHIHGEIYRRRGWLTSEGKEIKNKDEILALLKALFLPKRLSIIHCPGHQKGHSAEARGNRMADQAARKAAITETPDTSTLLAGKRTADGSEFEKRTADGSEFESPKKKAKVE

SEQ ID NO: 2764 - protein, 2096 aa, synthetic construct
  source 1..2096: note = Description of Artificial Sequence: Synthetic polypeptide
MPAAKRVKLDGGDKKYSIGLDIGTNSVGWAVITDEYKVPSKKFKVLGNTDRHSIKKNLIGALLFDSGETAEATRLKRTARRRYTRRKNRICYLQEIFSNEMAKVDDSFFHRLEESFLVEEDKKHERHPIFGNIVDEVAYHEKYPTIYHLRKKLVDSTDKADLRLIYLALAHMIKFRGHFLIEGDLNPDNSDVDKLFIQLVQTYNQLFEENPINASGVDAKAILSARLSKSRRLENLIAQLPGEKKNGLFGNLIALSLGLTPNFKSNFDLAEDAKLQLSKDTYDDDLDNLLAQIGDQYADLFLAAKNLSDAILLSDILRVNTEITKAPLSASMIKRYDEHHQDLTLLKALVRQQLPEKYKEIFFDQSKNGYAGYIDGGASQEEFYKFIKPILEKMDGTEELLVKLNREDLLRKQRTFDNGSIPHQIHLGELHAILRRQEDFYPFLKDNREKIEKILTFRIPYYVGPLARGNSRFAWMTRKSEETITPWNFEEVVDKGASAQSFIERMTNFDKNLPNEKVLPKHSLLYEYFTVYNELTKVKYVTEGMRKPAFLSGEQKKAIVDLLFKTNRKVTVKQLKEDYFKKIECFDSVEISGVEDRFNASLGTYHDLLKIIKDKDFLDNEENEDILEDIVLTLTLFEDREMIEERLKTYAHLFDDKVMKQLKRRRYTGWGRLSRKLINGIRDKQSGKTILDFLKSDGFANRNFMQLIHDDSLTFKEDIQKAQVSGQGDSLHEHIANLAGSPAIKKGILQTVKVVDELVKVMGRHKPENIVIEMARENQTTQKGQKNSRERMKRIEEGIKELGSQILKEHPVENTQLQNEKLYLYYLQNGRDMYVDQELDINRLSDYDVDHIVPQSFLKDDSIDNKVLTRSDKARGKSDNVPSEEVVKKMKNYWRQLLNAKLITQRKFDNLTKAERGGLSELDKAGFIKRQLVETRQITKHVAQILDSRMNTKYDENDKLIREVKVITLKSKLVSDFRKDFQFYKVREINNYHHAHDAYLNAVVGTALIKKYPKLESEFVYGDYKVYDVRKMIAKSEQEIGKATAKYFFYSNIMNFFKTEITLANGEIRKRPLIETNGETGEIVWDKGRDFATVRKVLSMPQVNIVKKTEVQTGGFSKESILPKRNSDKLIARKKDWDPKKYGGFDSPTVAYSVLVVAKVEKGKSKKLKSVKELLGITIMERSSFEKNPIDFLEAKGYKEVKKDLIIKLPKYSLFELENGRKRMLASAGELQKGNELALPSKYVNFLYLASHYEKLKGSPEDNEQKQLFVEQHKHYLDEIIEQISEFSKRVILADANLDKVLSAYNKHRDKPIREQAENIIHLFTLTNLGAPAAFKYFDTTIDRKRYTSTKEVLDATLIHQSITGLYETRIDLSQLGGDGGGGGGSSEAAAKGGTLNIEDEHRLHETSKEPDVSLGSTWLSDFPQAWAETGGMGLAVRQAPLIIPLKATSTPVSIKQYPMSQEARLGIKPHIQRLLDQGILVPCQSPWNTPLLPVKKPGTNDYRPVQDLREVNKRVEDIHPTVPNPYNLLSGLPPSHQWYTVLDLKDAFFCLRLHPTSQPLFAFEWRDPEMGISGQLTWTRLPQGFKNSPTLFNEALHRDLADFRIQHPDLILLQYVDDLLLAATSELDCQQGTRALLQTLGNLGYRASAKKAQICQKQVKYLGYLLKEGQRWLTEARKETVMGQPTPKTPRQLREFLGTAGFCRLWIPGFAEMAAPLYPLTKPGTLFNWGPDQQKAYQEIKQALLTAPALGLPDLTKPFELFVDEKQGYAKGVLTQKLGPWRRPVAYLSKKLDPVAAGWPPCLRMVAAIAVLTKDAGKLTMGQPLVILAPHAVEALVKQPPDRWLSNARMTHYQALLLDTDRVQFGPVVALNPATLLPLPEEGLQHNCLDILAEAHGTRPDLTDQPLPDADHTWYTDGSSLLQEGQRKAGAAVTTETEVIWAKALPAGTSAQRAELIALTQALKMAEGKKLNVYTDSRYAFATAHIHGEIYRRRGWLTSEGKEIKNKDEILALLKALFLPKRLSIIHCPGHQKGHSAEARGNRMADQAARKAAITETPDTSTLLAGKRTADGSEFEKRTADGSEFESPKKKAKVE

SEQ ID NO: 2765 - protein, 2096 aa, synthetic construct
  source 1..2096: note = Description of Artificial Sequence: Synthetic polypeptide
MPAAKRVKLDGGDKKYSIGLDIGTNSVGWAVITDEYKVPSKKFKVLGNTDRHSIKKNLIGALLFDSGETAEATRLKRTARRRYTRRKNRICYLQEIFSNEMAKVDDSFFHRLEESFLVEEDKKHERHPIFGNIVDEVAYHEKYPTIYHLRKKLVDSTDKADLRLIYLALAHMIKFRGHFLIEGDLNPDNSDVDKLFIQLVQTYNQLFEENPINASGVDAKAILSARLSKSRRLENLIAQLPGEKKNGLFGNLIALSLGLTPNFKSNFDLAEDAKLQLSKDTYDDDLDNLLAQIGDQYADLFLAAKNLSDAILLSDILRVNTEITKAPLSASMIKRYDEHHQDLTLLKALVRQQLPEKYKEIFFDQSKNGYAGYIDGGASQEEFYKFIKPILEKMDGTEELLVKLNREDLLRKQRTFDNGSIPHQIHLGELHAILRRQEDFYPFLKDNREKIEKILTFRIPYYVGPLARGNSRFAWMTRKSEETITPWNFEEVVDKGASAQSFIERMTNFDKNLPNEKVLPKHSLLYEYFTVYNELTKVKYVTEGMRKPAFLSGEQKKAIVDLLFKTNRKVTVKQLKEDYFKKIECFDSVEISGVEDRFNASLGTYHDLLKIIKDKDFLDNEENEDILEDIVLTLTLFEDREMIEERLKTYAHLFDDKVMKQLKRRRYTGWGRLSRKLINGIRDKQSGKTILDFLKSDGFANRNFMQLIHDDSLTFKEDIQKAQVSGQGDSLHEHIANLAGSPAIKKGILQTVKVVDELVKVMGRHKPENIVIEMARENQTTQKGQKNSRERMKRIEEGIKELGSQILKEHPVENTQLQNEKLYLYYLQNGRDMYVDQELDINRLSDYDVDHIVPQSFLKDDSIDNKVLTRSDKARGKSDNVPSEEVVKKMKNYWRQLLNAKLITQRKFDNLTKAERGGLSELDKAGFIKRQLVETRQITKHVAQILDSRMNTKYDENDKLIREVKVITLKSKLVSDFRKDFQFYKVREINNYHHAHDAYLNAVVGTALIKKYPKLESEFVYGDYKVYDVRKMIAKSEQEIGKATAKYFFYSNIMNFFKTEITLANGEIRKRPLIETNGETGEIVWDKGRDFATVRKVLSMPQVNIVKKTEVQTGGFSKESILPKRNSDKLIARKKDWDPKKYGGFDSPTVAYSVLVVAKVEKGKSKKLKSVKELLGITIMERSSFEKNPIDFLEAKGYKEVKKDLIIKLPKYSLFELENGRKRMLASAGELQKGNELALPSKYVNFLYLASHYEKLKGSPEDNEQKQLFVEQHKHYLDEIIEQISEFSKRVILADANLDKVLSAYNKHRDKPIREQAENIIHLFTLTNLGAPAAFKYFDTTIDRKRYTSTKEVLDATLIHQSITGLYETRIDLSQLGGDGGEAAAKPAPGGGGGTLNIEDEHRLHETSKEPDVSLGSTWLSDFPQAWAETGGMGLAVRQAPLIIPLKATSTPVSIKQYPMSQEARLGIKPHIQRLLDQGILVPCQSPWNTPLLPVKKPGTNDYRPVQDLREVNKRVEDIHPTVPNPYNLLSGLPPSHQWYTVLDLKDAFFCLRLHPTSQPLFAFEWRDPEMGISGQLTWTRLPQGFKNSPTLFNEALHRDLADFRIQHPDLILLQYVDDLLLAATSELDCQQGTRALLQTLGNLGYRASAKKAQICQKQVKYLGYLLKEGQRWLTEARKETVMGQPTPKTPRQLREFLGTAGFCRLWIPGFAEMAAPLYPLTKPGTLFNWGPDQQKAYQEIKQALLTAPALGLPDLTKPFELFVDEKQGYAKGVLTQKLGPWRRPVAYLSKKLDPVAAGWPPCLRMVAAIAVLTKDAGKLTMGQPLVILAPHAVEALVKQPPDRWLSNARMTHYQALLLDTDRVQFGPVVALNPATLLPLPEEGLQHNCLDILAEAHGTRPDLTDQPLPDADHTWYTDGSSLLQEGQRKAGAAVTTETEVIWAKALPAGTSAQRAELIALTQALKMAEGKKLNVYTDSRYAFATAHIHGEIYRRRGWLTSEGKEIKNKDEILALLKALFLPKRLSIIHCPGHQKGHSAEARGNRMADQAARKAAITETPDTSTLLAGKRTADGSEFEKRTADGSEFESPKKKAKVE

SEQ ID NO: 2766 - protein, 2094 aa, synthetic construct
  source 1..2094: note = Description of Artificial Sequence: Synthetic polypeptide
MPAAKRVKLDGGDKKYSIGLDIGTNSVGWAVITDEYKVPSKKFKVLGNTDRHSIKKNLIGALLFDSGETAEATRLKRTARRRYTRRKNRICYLQEIFSNEMAKVDDSFFHRLEESFLVEEDKKHERHPIFGNIVDEVAYHEKYPTIYHLRKKLVDSTDKADLRLIYLALAHMIKFRGHFLIEGDLNPDNSDVDKLFIQLVQTYNQLFEENPINASGVDAKAILSARLSKSRRLENLIAQLPGEKKNGLFGNLIALSLGLTPNFKSNFDLAEDAKLQLSKDTYDDDLDNLLAQIGDQYADLFLAAKNLSDAILLSDILRVNTEITKAPLSASMIKRYDEHHQDLTLLKALVRQQLPEKYKEIFFDQSKNGYAGYIDGGASQEEFYKFIKPILEKMDGTEELLVKLNREDLLRKQRTFDNGSIPHQIHLGELHAILRRQEDFYPFLKDNREKIEKILTFRIPYYVGPLARGNSRFAWMTRKSEETITPWNFEEVVDKGASAQSFIERMTNFDKNLPNEKVLPKHSLLYEYFTVYNELTKVKYVTEGMRKPAFLSGEQKKAIVDLLFKTNRKVTVKQLKEDYFKKIECFDSVEISGVEDRFNASLGTYHDLLKIIKDKDFLDNEENEDILEDIVLTLTLFEDREMIEERLKTYAHLFDDKVMKQLKRRRYTGWGRLSRKLINGIRDKQSGKTILDFLKSDGFANRNFMQLIHDDSLTFKEDIQKAQVSGQGDSLHEHIANLAGSPAIKKGILQTVKVVDELVKVMGRHKPENIVIEMARENQTTQKGQKNSRERMKRIEEGIKELGSQILKEHPVENTQLQNEKLYLYYLQNGRDMYVDQELDINRLSDYDVDHIVPQSFLKDDSIDNKVLTRSDKARGKSDNVPSEEVVKKMKNYWRQLLNAKLITQRKFDNLTKAERGGLSELDKAGFIKRQLVETRQITKHVAQILDSRMNTKYDENDKLIREVKVITLKSKLVSDFRKDFQFYKVREINNYHHAHDAYLNAVVGTALIKKYPKLESEFVYGDYKVYDVRKMIAKSEQEIGKATAKYFFYSNIMNFFKTEITLANGEIRKRPLIETNGETGEIVWDKGRDFATVRKVLSMPQVNIVKKTEVQTGGFSKESILPKRNSDKLIARKKDWDPKKYGGFDSPTVAYSVLVVAKVEKGKSKKLKSVKELLGITIMERSSFEKNPIDFLEAKGYKEVKKDLIIKLPKYSLFELENGRKRMLASAGELQKGNELALPSKYVNFLYLASHYEKLKGSPEDNEQKQLFVEQHKHYLDEIIEQISEFSKRVILADANLDKVLSAYNKHRDKPIREQAENIIHLFTLTNLGAPAAFKYFDTTIDRKRYTSTKEVLDATLIHQSITGLYETRIDLSQLGGDGGGGSGGGPAPGGTLNIEDEHRLHETSKEPDVSLGSTWLSDFPQAWAETGGMGLAVRQAPLIIPLKATSTPVSIKQYPMSQEARLGIKPHIQRLLDQGILVPCQSPWNTPLLPVKKPGTNDYRPVQDLREVNKRVEDIHPTVPNPYNLLSGLPPSHQWYTVLDLKDAFFCLRLHPTSQPLFAFEWRDPEMGISGQLTWTRLPQGFKNSPTLFNEALHRDLADFRIQHPDLILLQYVDDLLLAATSELDCQQGTRALLQTLGNLGYRASAKKAQICQKQVKYLGYLLKEGQRWLTEARKETVMGQPTPKTPRQLREFLGTAGFCRLWIPGFAEMAAPLYPLTKPGTLFNWGPDQQKAYQEIKQALLTAPALGLPDLTKPFELFVDEKQGYAKGVLTQKLGPWRRPVAYLSKKLDPVAAGWPPCLRMVAAIAVLTKDAGKLTMGQPLVILAPHAVEALVKQPPDRWLSNARMTHYQALLLDTDRVQFGPVVALNPATLLPLPEEGLQHNCLDILAEAHGTRPDLTDQPLPDADHTWYTDGSSLLQEGQRKAGAAVTTETEVIWAKALPAGTSAQRAELIALTQALKMAEGKKLNVYTDSRYAFATAHIHGEIYRRRGWLTSEGKEIKNKDEILALLKALFLPKRLSIIHCPGHQKGHSAEARGNRMADQAARKAAITETPDTSTLLAGKRTADGSEFEKRTADGSEFESPKKKAKVE

SEQ ID NO: 2767 - protein, 2096 aa, synthetic construct
  source 1..2096: note = Description of Artificial Sequence: Synthetic polypeptide
MPAAKRVKLDGGDKKYSIGLDIGTNSVGWAVITDEYKVPSKKFKVLGNTDRHSIKKNLIGALLFDSGETAEATRLKRTARRRYTRRKNRICYLQEIFSNEMAKVDDSFFHRLEESFLVEEDKKHERHPIFGNIVDEVAYHEKYPTIYHLRKKLVDSTDKADLRLIYLALAHMIKFRGHFLIEGDLNPDNSDVDKLFIQLVQTYNQLFEENPINASGVDAKAILSARLSKSRRLENLIAQLPGEKKNGLFGNLIALSLGLTPNFKSNFDLAEDAKLQLSKDTYDDDLDNLLAQIGDQYADLFLAAKNLSDAILLSDILRVNTEITKAPLSASMIKRYDEHHQDLTLLKALVRQQLPEKYKEIFFDQSKNGYAGYIDGGASQEEFYKFIKPILEKMDGTEELLVKLNREDLLRKQRTFDNGSIPHQIHLGELHAILRRQEDFYPFLKDNREKIEKILTFRIPYYVGPLARGNSRFAWMTRKSEETITPWNFEEVVDKGASAQSFIERMTNFDKNLPNEKVLPKHSLLYEYFTVYNELTKVKYVTEGMRKPAFLSGEQKKAIVDLLFKTNRKVTVKQLKEDYFKKIECFDSVEISGVEDRFNASLGTYHDLLKIIKDKDFLDNEENEDILEDIVLTLTLFEDREMIEERLKTYAHLFDDKVMKQLKRRRYTGWGRLSRKLINGIRDKQSGKTILDFLKSDGFANRNFMQLIHDDSLTFKEDIQKAQVSGQGDSLHEHIANLAGSPAIKKGILQTVKVVDELVKVMGRHKPENIVIEMARENQTTQKGQKNSRERMKRIEEGIKELGSQILKEHPVENTQLQNEKLYLYYLQNGRDMYVDQELDINRLSDYDVDHIVPQSFLKDDSIDNKVLTRSDKARGKSDNVPSEEVVKKMKNYWRQLLNAKLITQRKFDNLTKAERGGLSELDKAGFIKRQLVETRQITKHVAQILDSRMNTKYDENDKLIREVKVITLKSKLVSDFRKDFQFYKVREINNYHHAHDAYLNAVVGTALIKKYPKLESEFVYGDYKVYDVRKMIAKSEQEIGKATAKYFFYSNIMNFFKTEITLANGEIRKRPLIETNGETGEIVWDKGRDFATVRKVLSMPQVNIVKKTEVQTGGFSKESILPKRNSDKLIARKKDWDPKKYGGFDSPTVAYSVLVVAKVEKGKSKKLKSVKELLGITIMERSSFEKNPIDFLEAKGYKEVKKDLIIKLPKYSLFELENGRKRMLASAGELQKGNELALPSKYVNFLYLASHYEKLKGSPEDNEQKQLFVEQHKHYLDEIIEQISEFSKRVILADANLDKVLSAYNKHRDKPIREQAENIIHLFTLTNLGAPAAFKYFDTTIDRKRYTSTKEVLDATLIHQSITGLYETRIDLSQLGGDGGEAAAKGGSGGGGGTLNIEDEHRLHETSKEPDVSLGSTWLSDFPQAWAETGGMGLAVRQAPLIIPLKATSTPVSIKQYPMSQEARLGIKPHIQRLLDQGILVPCQSPWNTPLLPVKKPGTNDYRPVQDLREVNKRVEDIHPTVPNPYNLLSGLPPSHQWYTVLDLKDAFFCLRLHPTSQPLFAFEWRDPEMGISGQLTWTRLPQGFKNSPTLFNEALHRDLADFRIQHPDLILLQYVDDLLLAATSELDCQQGTRALLQTLGNLGYRASAKKAQICQKQVKYLGYLLKEGQRWLTEARKETVMGQPTPKTPRQLREFLGTAGFCRLWIPGFAEMAAPLYPLTKPGTLFNWGPDQQKAYQEIKQALLTAPALGLPDLTKPFELFVDEKQGYAKGVLTQKLGPWRRPVAYLSKKLDPVAAGWPPCLRMVAAIAVLTKDAGKLTMGQPLVILAPHAVEALVKQPPDRWLSNARMTHYQALLLDTDRVQFGPVVALNPATLLPLPEEGLQHNCLDILAEAHGTRPDLTDQPLPDADHTWYTDGSSLLQEGQRKAGAAVTTETEVIWAKALPAGTSAQRAELIALTQALKMAEGKKLNVYTDSRYAFATAHIHGEIYRRRGWLTSEGKEIKNKDEILALLKALFLPKRLSIIHCPGHQKGHSAEARGNRMADQAARKAAITETPDTSTLLAGKRTADGSEFEKRTADGSEFESPKKKAKVE

SEQ ID NO: 2768 - protein, 2094 aa, synthetic construct
  source 1..2094: note = Description of Artificial Sequence: Synthetic polypeptide
MPAAKRVKLDGGDKKYSIGLDIGTNSVGWAVITDEYKVPSKKFKVLGNTDRHSIKKNLIGALLFDSGETAEATRLKRTARRRYTRRKNRICYLQEIFSNEMAKVDDSFFHRLEESFLVEEDKKHERHPIFGNIVDEVAYHEKYPTIYHLRKKLVDSTDKADLRLIYLALAHMIKFRGHFLIEGDLNPDNSDVDKLFIQLVQTYNQLFEENPINASGVDAKAILSARLSKSRRLENLIAQLPGEKKNGLFGNLIALSLGLTPNFKSNFDLAEDAKLQLSKDTYDDDLDNLLAQIGDQYADLFLAAKNLSDAILLSDILRVNTEITKAPLSASMIKRYDEHHQDLTLLKALVRQQLPEKYKEIFFDQSKNGYAGYIDGGASQEEFYKFIKPILEKMDGTEELLVKLNREDLLRKQRTFDNGSIPHQIHLGELHAILRRQEDFYPFLKDNREKIEKILTFRIPYYVGPLARGNSRFAWMTRKSEETITPWNFEEVVDKGASAQSFIERMTNFDKNLPNEKVLPKHSLLYEYFTVYNELTKVKYVTEGMRKPAFLSGEQKKAIVDLLFKTNRKVTVKQLKEDYFKKIECFDSVEISGVEDRFNASLGTYHDLLKIIKDKDFLDNEENEDILEDIVLTLTLFEDREMIEERLKTYAHLFDDKVMKQLKRRRYTGWGRLSRKLINGIRDKQSGKTILDFLKSDGFANRNFMQLIHDDSLTFKEDIQKAQVSGQGDSLHEHIANLAGSPAIKKGILQTVKVVDELVKVMGRHKPENIVIEMARENQTTQKGQKNSRERMKRIEEGIKELGSQILKEHPVENTQLQNEKLYLYYLQNGRDMYVDQELDINRLSDYDVDHIVPQSFLKDDSIDNKVLTRSDKARGKSDNVPSEEVVKKMKNYWRQLLNAKLITQRKFDNLTKAERGGLSELDKAGFIKRQLVETRQITKHVAQILDSRMNTKYDENDKLIREVKVITLKSKLVSDFRKDFQFYKVREINNYHHAHDAYLNAVVGTALIKKYPKLESEFVYGDYKVYDVRKMIAKSEQEIGKATAKYFFYSNIMNFFKTEITLANGEIRKRPLIETNGETGEIVWDKGRDFATVRKVLSMPQVNIVKKTEVQTGGFSKESILPKRNSDKLIARKKDWDPKKYGGFDSPTVAYSVLVVAKVEKGKSKKLKSVKELLGITIMERSSFEKNPIDFLEAKGYKEVKKDLIIKLPKYSLFELENGRKRMLASAGELQKGNELALPSKYVNFLYLASHYEKLKGSPEDNEQKQLFVEQHKHYLDEIIEQISEFSKRVILADANLDKVLSAYNKHRDKPIREQAENIIHLFTLTNLGAPAAFKYFDTTIDRKRYTSTKEVLDATLIHQSITGLYETRIDLSQLGGDGGGSSGGSPAPGGTLNIEDEHRLHETSKEPDVSLGSTWLSDFPQAWAETGGMGLAVRQAPLIIPLKATSTPVSIKQYPMSQEARLGIKPHIQRLLDQGILVPCQSPWNTPLLPVKKPGTNDYRPVQDLREVNKRVEDIHPTVPNPYNLLSGLPPSHQWYTVLDLKDAFFCLRLHPTSQPLFAFEWRDPEMGISGQLTWTRLPQGFKNSPTLFNEALHRDLADFRIQHPDLILLQYVDDLLLAATSELDCQQGTRALLQTLGNLGYRASAKKAQICQKQVKYLGYLLKEGQRWLTEARKETVMGQPTPKTPRQLREFLGTAGFCRLWIPGFAEMAAPLYPLTKPGTLFNWGPDQQKAYQEIKQALLTAPALGLPDLTKPFELFVDEKQGYAKGVLTQKLGPWRRPVAYLSKKLDPVAAGWPPCLRMVAAIAVLTKDAGKLTMGQPLVILAPHAVEALVKQPPDRWLSNARMTHYQALLLDTDRVQFGPVVALNPATLLPLPEEGLQHNCLDILAEAHGTRPDLTDQPLPDADHTWYTDGSSLLQEGQRKAGAAVTTETEVIWAKALPAGTSAQRAELIALTQALKMAEGKKLNVYTDSRYAFATAHIHGEIYRRRGWLTSEGKEIKNKDEILALLKALFLPKRLSIIHCPGHQKGHSAEARGNRMADQAARKAAITETPDTSTLLAGKRTADGSEFEKRTADGSEFESPKKKAKVE

SEQ ID NO: 2769 - protein, 2094 aa, synthetic construct
  source 1..2094: note = Description of Artificial Sequence: Synthetic polypeptide
MPAAKRVKLDGGDKKYSIGLDIGTNSVGWAVITDEYKVPSKKFKVLGNTDRHSIKKNLIGALLFDSGETAEATRLKRTARRRYTRRKNRICYLQEIFSNEMAKVDDSFFHRLEESFLVEEDKKHERHPIFGNIVDEVAYHEKYPTIYHLRKKLVDSTDKADLRLIYLALAHMIKFRGHFLIEGDLNPDNSDVDKLFIQLVQTYNQLFEENPINASGVDAKAILSARLSKSRRLENLIAQLPGEKKNGLFGNLIALSLGLTPNFKSNFDLAEDAKLQLSKDTYDDDLDNLLAQIGDQYADLFLAAKNLSDAILLSDILRVNTEITKAPLSASMIKRYDEHHQDLTLLKALVRQQLPEKYKEIFFDQSKNGYAGYIDGGASQEEFYKFIKPILEKMDGTEELLVKLNREDLLRKQRTFDNGSIPHQIHLGELHAILRRQEDFYPFLKDNREKIEKILTFRIPYYVGPLARGNSRFAWMTRKSEETITPWNFEEVVDKGASAQSFIERMTNFDKNLPNEKVLPKHSLLYEYFTVYNELTKVKYVTEGMRKPAFLSGEQKKAIVDLLFKTNRKVTVKQLKEDYFKKIECFDSVEISGVEDRFNASLGTYHDLLKIIKDKDFLDNEENEDILEDIVLTLTLFEDREMIEERLKTYAHLFDDKVMKQLKRRRYTGWGRLSRKLINGIRDKQSGKTILDFLKSDGFANRNFMQLIHDDSLTFKEDIQKAQVSGQGDSLHEHIANLAGSPAIKKGILQTVKVVDELVKVMGRHKPENIVIEMARENQTTQKGQKNSRERMKRIEEGIKELGSQILKEHPVENTQLQNEKLYLYYLQNGRDMYVDQELDINRLSDYDVDHIVPQSFLKDDSIDNKVLTRSDKARGKSDNVPSEEVVKKMKNYWRQLLNAKLITQRKFDNLTKAERGGLSELDKAGFIKRQLVETRQITKHVAQILDSRMNTKYDENDKLIREVKVITLKSKLVSDFRKDFQFYKVREINNYHHAHDAYLNAVVGTALIKKYPKLESEFVYGDYKVYDVRKMIAKSEQEIGKATAKYFFYSNIMNFFKTEITLANGEIRKRPLIETNGETGEIVWDKGRDFATVRKVLSMPQVNIVKKTEVQTGGFSKESILPKRNSDKLIARKKDWDPKKYGGFDSPTVAYSVLVVAKVEKGKSKKLKSVKELLGITIMERSSFEKNPIDFLEAKGYKEVKKDLIIKLPKYSLFELENGRKRMLASAGELQKGNELALPSKYVNFLYLASHYEKLKGSPEDNEQKQLFVEQHKHYLDEIIEQISEFSKRVILADANLDKVLSAYNKHRDKPIREQAENIIHLFTLTNLGAPAAFKYFDTTIDRKRYTSTKEVLDATLIHQSITGLYETRIDLSQLGGDGGGGGGGSPAPGGTLNIEDEHRLHETSKEPDVSLGSTWLSDFPQAWAETGGMGLAVRQAPLIIPLKATSTPVSIKQYPMSQEARLGIKPHIQRLLDQGILVPCQSPWNTPLLPVKKPGTNDYRPVQDLREVNKRVEDIHPTVPNPYNLLSGLPPSHQWYTVLDLKDAFFCLRLHPTSQPLFAFEWRDPEMGISGQLTWTRLPQGFKNSPTLFNEALHRDLADFRIQHPDLILLQYVDDLLLAATSELDCQQGTRALLQTLGNLGYRASAKKAQICQKQVKYLGYLLKEGQRWLTEARKETVMGQPTPKTPRQLREFLGTAGFCRLWIPGFAEMAAPLYPLTKPGTLFNWGPDQQKAYQEIKQALLTAPALGLPDLTKPFELFVDEKQGYAKGVLTQKLGPWRRPVAYLSKKLDPVAAGWPPCLRMVAAIAVLTKDAGKLTMGQPLVILAPHAVEALVKQPPDRWLSNARMTHYQALLLDTDRVQFGPVVALNPATLLPLPEEGLQHNCLDILAEAHGTRPDLTDQPLPDADHTWYTDGSSLLQEGQRKAGAAVTTETEVIWAKALPAGTSAQRAELIALTQALKMAEGKKLNVYTDSRYAFATAHIHGEIYRRRGWLTSEGKEIKNKDEILALLKALFLPKRLSIIHCPGHQKGHSAEARGNRMADQAARKAAITETPDTSTLLAGKRTADGSEFEKRTADGSEFESPKKKAKVE

SEQ ID NO: 2770 - protein, 2094 aa, synthetic construct
  source 1..2094: note = Description of Artificial Sequence: Synthetic polypeptide
MPAAKRVKLDGGDKKYSIGLDIGTNSVGWAVITDEYKVPSKKFKVLGNTDRHSIKKNLIGALLFDSGETAEATRLKRTARRRYTRRKNRICYLQEIFSNEMAKVDDSFFHRLEESFLVEEDKKHERHPIFGNIVDEVAYHEKYPTIYHLRKKLVDSTDKADLRLIYLALAHMIKFRGHFLIEGDLNPDNSDVDKLFIQLVQTYNQLFEENPINASGVDAKAILSARLSKSRRLENLIAQLPGEKKNGLFGNLIALSLGLTPNFKSNFDLAEDAKLQLSKDTYDDDLDNLLAQIGDQYADLFLAAKNLSDAILLSDILRVNTEITKAPLSASMIKRYDEHHQDLTLLKALVRQQLPEKYKEIFFDQSKNGYAGYIDGGASQEEFYKFIKPILEKMDGTEELLVKLNREDLLRKQRTFDNGSIPHQIHLGELHAILRRQEDFYPFLKDNREKIEKILTFRIPYYVGPLARGNSRFAWMTRKSEETITPWNFEEVVDKGASAQSFIERMTNFDKNLPNEKVLPKHSLLYEYFTVYNELTKVKYVTEGMRKPAFLSGEQKKAIVDLLFKTNRKVTVKQLKEDYFKKIECFDSVEISGVEDRFNASLGTYHDLLKIIKDKDFLDNEENEDILEDIVLTLTLFEDREMIEERLKTYAHLFDDKVMKQLKRRRYTGWGRLSRKLINGIRDKQSGKTILDFLKSDGFANRNFMQLIHDDSLTFKEDIQKAQVSGQGDSLHEHIANLAGSPAIKKGILQTVKVVDELVKVMGRHKPENIVIEMARENQTTQKGQKNSRERMKRIEEGIKELGSQILKEHPVENTQLQNEKLYLYYLQNGRDMYVDQELDINRLSDYDVDHIVPQSFLKDDSIDNKVLTRSDKARGKSDNVPSEEVVKKMKNYWRQLLNAKLITQRKFDNLTKAERGGLSELDKAGFIKRQLVETRQITKHVAQILDSRMNTKYDENDKLIREVKVITLKSKLVSDFRKDFQFYKVREINNYHHAHDAYLNAVVGTALIKKYPKLESEFVYGDYKVYDVRKMIAKSEQEIGKATAKYFFYSNIMNFFKTEITLANGEIRKRPLIETNGETGEIVWDKGRDFATVRKVLSMPQVNIVKKTEVQTGGFSKESILPKRNSDKLIARKKDWDPKKYGGFDSPTVAYSVLVVAKVEKGKSKKLKSVKELLGITIMERSSFEKNPIDFLEAKGYKEVKKDLIIKLPKYSLFELENGRKRMLASAGELQKGNELALPSKYVNFLYLASHYEKLKGSPEDNEQKQLFVEQHKHYLDEIIEQISEFSKRVILADANLDKVLSAYNKHRDKPIREQAENIIHLFTLTNLGAPAAFKYFDTTIDRKRYTSTKEVLDATLIHQSITGLYETRIDLSQLGGDGGGGGGSSPAPGGTLNIEDEHRLHETSKEPDVSLGSTWLSDFPQAWAETGGMGLAVRQAPLIIPLKATSTPVSIKQYPMSQEARLGIKPHIQRLLDQGILVPCQSPWNTPLLPVKKPGTNDYRPVQDLREVNKRVEDIHPTVPNPYNLLSGLPPSHQWYTVLDLKDAFFCLRLHPTSQPLFAFEWRDPEMGISGQLTWTRLPQGFKNSPTLFNEALHRDLADFRIQHPDLILLQYVDDLLLAATSELDCQQGTRALLQTLGNLGYRASAKKAQICQKQVKYLGYLLKEGQRWLTEARKETVMGQPTPKTPRQLREFLGTAGFCRLWIPGFAEMAAPLYPLTKPGTLFNWGPDQQKAYQEIKQALLTAPALGLPDLTKPFELFVDEKQGYAKGVLTQKLGPWRRPVAYLSKKLDPVAAGWPPCLRMVAAIAVLTKDAGKLTMGQPLVILAPHAVEALVKQPPDRWLSNARMTHYQALLLDTDRVQFGPVVALNPATLLPLPEEGLQHNCLDILAEAHGTRPDLTDQPLPDADHTWYTDGSSLLQEGQRKAGAAVTTETEVIWAKALPAGTSAQRAELIALTQALKMAEGKKLNVYTDSRYAFATAHIHGEIYRRRGWLTSEGKEIKNKDEILALLKALFLPKRLSIIHCPGHQKGHSAEARGNRMADQAARKAAITETPDTSTLLAGKRTADGSEFEKRTADGSEFESPKKKAKVE

SEQ ID NO: 2771 - protein, 2105 aa, synthetic construct
  source 1..2105: note = Description of Artificial Sequence: Synthetic polypeptide
MPAAKRVKLDGGDKKYSIGLDIGTNSVGWAVITDEYKVPSKKFKVLGNTDRHSIKKNLIGALLFDSGETAEATRLKRTARRRYTRRKNRICYLQEIFSNEMAKVDDSFFHRLEESFLVEEDKKHERHPIFGNIVDEVAYHEKYPTIYHLRKKLVDSTDKADLRLIYLALAHMIKFRGHFLIEGDLNPDNSDVDKLFIQLVQTYNQLFEENPINASGVDAKAILSARLSKSRRLENLIAQLPGEKKNGLFGNLIALSLGLTPNFKSNFDLAEDAKLQLSKDTYDDDLDNLLAQIGDQYADLFLAAKNLSDAILLSDILRVNTEITKAPLSASMIKRYDEHHQDLTLLKALVRQQLPEKYKEIFFDQSKNGYAGYIDGGASQEEFYKFIKPILEKMDGTEELLVKLNREDLLRKQRTFDNGSIPHQIHLGELHAILRRQEDFYPFLKDNREKIEKILTFRIPYYVGPLARGNSRFAWMTRKSEETITPWNFEEVVDKGASAQSFIERMTNFDKNLPNEKVLPKHSLLYEYFTVYNELTKVKYVTEGMRKPAFLSGEQKKAIVDLLFKTNRKVTVKQLKEDYFKKIECFDSVEISGVEDRFNASLGTYHDLLKIIKDKDFLDNEENEDILEDIVLTLTLFEDREMIEERLKTYAHLFDDKVMKQLKRRRYTGWGRLSRKLINGIRDKQSGKTILDFLKSDGFANRNFMQLIHDDSLTFKEDIQKAQVSGQGDSLHEHIANLAGSPAIKKGILQTVKVVDELVKVMGRHKPENIVIEMARENQTTQKGQKNSRERMKRIEEGIKELGSQILKEHPVENTQLQNEKLYLYYLQNGRDMYVDQELDINRLSDYDVDHIVPQSFLKDDSIDNKVLTRSDKARGKSDNVPSEEVVKKMKNYWRQLLNAKLITQRKFDNLTKAERGGLSELDKAGFIKRQLVETRQITKHVAQILDSRMNTKYDENDKLIREVKVITLKSKLVSDFRKDFQFYKVREINNYHHAHDAYLNAVVGTALIKKYPKLESEFVYGDYKVYDVRKMIAKSEQEIGKATAKYFFYSNIMNFFKTEITLANGEIRKRPLIETNGETGEIVWDKGRDFATVRKVLSMPQVNIVKKTEVQTGGFSKESILPKRNSDKLIARKKDWDPKKYGGFDSPTVAYSVLVVAKVEKGKSKKLKSVKELLGITIMERSSFEKNPIDFLEAKGYKEVKKDLIIKLPKYSLFELENGRKRMLASAGELQKGNELALPSKYVNFLYLASHYEKLKGSPEDNEQKQLFVEQHKHYLDEIIEQISEFSKRVILADANLDKVLSAYNKHRDKPIREQAENIIHLFTLTNLGAPAAFKYFDTTIDRKRYTSTKEVLDATLIHQSITGLYETRIDLSQLGGDGGGGGGSGGGGSGGGGSGGGGSGGTLNIEDEHRLHETSKEPDVSLGSTWLSDFPQAWAETGGMGLAVRQAPLIIPLKATSTPVSIKQYPMSQEARLGIKPHIQRLLDQGILVPCQSPWNTPLLPVKKPGTNDYRPVQDLREVNKRVEDIHPTVPNPYNLLSGLPPSHQWYTVLDLKDAFFCLRLHPTSQPLFAFEWRDPEMGISGQLTWTRLPQGFKNSPTLFNEALHRDLADFRIQHPDLILLQYVDDLLLAATSELDCQQGTRALLQTLGNLGYRASAKKAQICQKQVKYLGYLLKEGQRWLTEARKETVMGQPTPKTPRQLREFLGTAGFCRLWIPGFAEMAAPLYPLTKPGTLFNWGPDQQKAYQEIKQALLTAPALGLPDLTKPFELFVDEKQGYAKGVLTQKLGPWRRPVAYLSKKLDPVAAGWPPCLRMVAAIAVLTKDAGKLTMGQPLVILAPHAVEALVKQPPDRWLSNARMTHYQALLLDTDRVQFGPVVALNPATLLPLPEEGLQHNCLDILAEAHGTRPDLTDQPLPDADHTWYTDGSSLLQEGQRKAGAAVTTETEVIWAKALPAGTSAQRAELIALTQALKMAEGKKLNVYTDSRYAFATAHIHGEIYRRRGWLTSEGKEIKNKDEILALLKALFLPKRLSIIHCPGHQKGHSAEARGNRMADQAARKAAITETPDTSTLLAGKRTADGSEFEKRTADGSEFESPKKKAKVE

SEQ ID NO: 2772 - protein, 2100 aa, synthetic construct
  source 1..2100: note = Description of Artificial Sequence: Synthetic polypeptide
MPAAKRVKLDGGDKKYSIGLDIGTNSVGWAVITDEYKVPSKKFKVLGNTDRHSIKKNLIGALLFDSGETAEATRLKRTARRRYTRRKNRICYLQEIFSNEMAKVDDSFFHRLEESFLVEEDKKHERHPIFGNIVDEVAYHEKYPTIYHLRKKLVDSTDKADLRLIYLALAHMIKFRGHFLIEGDLNPDNSDVDKLFIQLVQTYNQLFEENPINASGVDAKAILSARLSKSRRLENLIAQLPGEKKNGLFGNLIALSLGLTPNFKSNFDLAEDAKLQLSKDTYDDDLDNLLAQIGDQYADLFLAAKNLSDAILLSDILRVNTEITKAPLSASMIKRYDEHHQDLTLLKALVRQQLPEKYKEIFFDQSKNGYAGYIDGGASQEEFYKFIKPILEKMDGTEELLVKLNREDLLRKQRTFDNGSIPHQIHLGELHAILRRQEDFYPFLKDNREKIEKILTFRIPYYVGPLARGNSRFAWMTRKSEETITPWNFEEVVDKGASAQSFIERMTNFDKNLPNEKVLPKHSLLYEYFTVYNELTKVKYVTEGMRKPAFLSGEQKKAIVDLLFKTNRKVTVKQLKEDYFKKIECFDSVEISGVEDRFNASLGTYHDLLKIIKDKDFLDNEENEDILEDIVLTLTLFEDREMIEERLKTYAHLFDDKVMKQLKRRRYTGWGRLSRKLINGIRDKQSGKTILDFLKSDGFANRNFMQLIHDDSLTFKEDIQKAQVSGQGDSLHEHIANLAGSPAIKKGILQTVKVVDELVKVMGRHKPENIVIEMARENQTTQKGQKNSRERMKRIEEGIKELGSQILKEHPVENTQLQNEKLYLYYLQNGRDMYVDQELDINRLSDYDVDHIVPQSFLKDDSIDNKVLTRSDKARGKSDNVPSEEVVKKMKNYWRQLLNAKLITQRKFDNLTKAERGGLSELDKAGFIKRQLVETRQITKHVAQILDSRMNTKYDENDKLIREVKVITLKSKLVSDFRKDFQFYKVREINNYHHAHDAYLNAVVGTALIKKYPKLESEFVYGDYKVYDVRKMIAKSEQEIGKATAKYFFYSNIMNFFKTEITLANGEIRKRPLIETNGETGEIVWDKGRDFATVRKVLSMPQVNIVKKTEVQTGGFSKESILPKRNSDKLIARKKDWDPKKYGGFDSPTVAYSVLVVAKVEKGKSKKLKSVKELLGITIMERSSFEKNPIDFLEAKGYKEVKKDLIIKLPKYSLFELENGRKRMLASAGELQKGNELALPSKYVNFLYLASHYEKLKGSPEDNEQKQLFVEQHKHYLDEIIEQISEFSKRVILADANLDKVLSAYNKHRDKPIREQAENIIHLFTLTNLGAPAAFKYFDTTIDRKRYTSTKEVLDATLIHQSITGLYETRIDLSQLGGDGGEAAAKEAAAKEAAAKGGTLNIEDEHRLHETSKEPDVSLGSTWLSDFPQAWAETGGMGLAVRQAPLIIPLKATSTPVSIKQYPMSQEARLGIKPHIQRLLDQGILVPCQSPWNTPLLPVKKPGTNDYRPVQDLREVNKRVEDIHPTVPNPYNLLSGLPPSHQWYTVLDLKDAFFCLRLHPTSQPLFAFEWRDPEMGISGQLTWTRLPQGFKNSPTLFNEALHRDLADFRIQHPDLILLQYVDDLLLAATSELDCQQGTRALLQTLGNLGYRASAKKAQICQKQVKYLGYLLKEGQRWLTEARKETVMGQPTPKTPRQLREFLGTAGFCRLWIPGFAEMAAPLYPLTKPGTLFNWGPDQQKAYQEIKQALLTAPALGLPDLTKPFELFVDEKQGYAKGVLTQKLGPWRRPVAYLSKKLDPVAAGWPPCLRMVAAIAVLTKDAGKLTMGQPLVILAPHAVEALVKQPPDRWLSNARMTHYQALLLDTDRVQFGPVVALNPATLLPLPEEGLQHNCLDILAEAHGTRPDLTDQPLPDADHTWYTDGSSLLQEGQRKAGAAVTTETEVIWAKALPAGTSAQRAELIALTQALKMAEGKKLNVYTDSRYAFATAHIHGEIYRRRGWLTSEGKEIKNKDEILALLKALFLPKRLSIIHCPGHQKGHSAEARGNRMADQAARKAAITETPDTSTLLAGKRTADGSEFEKRTADGSEFESPKKKAKVE

SEQ ID NO: 2773 - protein, 2094 aa, synthetic construct
  source 1..2094: note = Description of Artificial Sequence: Synthetic polypeptide
MPAAKRVKLDGGDKKYSIGLDIGTNSVGWAVITDEYKVPSKKFKVLGNTDRHSIKKNLIGALLFDSGETAEATRLKRTARRRYTRRKNRICYLQEIFSNEMAKVDDSFFHRLEESFLVEEDKKHERHPIFGNIVDEVAYHEKYPTIYHLRKKLVDSTDKADLRLIYLALAHMIKFRGHFLIEGDLNPDNSDVDKLFIQLVQTYNQLFEENPINASGVDAKAILSARLSKSRRLENLIAQLPGEKKNGLFGNLIALSLGLTPNFKSNFDLAEDAKLQLSKDTYDDDLDNLLAQIGDQYADLFLAAKNLSDAILLSDILRVNTEITKAPLSASMIKRYDEHHQDLTLLKALVRQQLPEKYKEIFFDQSKNGYAGYIDGGASQEEFYKFIKPILEKMDGTEELLVKLNREDLLRKQRTFDNGSIPHQIHLGELHAILRRQEDFYPFLKDNREKIEKILTFRIPYYVGPLARGNSRFAWMTRKSEETITPWNFEEVVDKGASAQSFIERMTNFDKNLPNEKVLPKHSLLYEYFTVYNELTKVKYVTEGMRKPAFLSGEQKKAIVDLLFKTNRKVTVKQLKEDYFKKIECFDSVEISGVEDRFNASLGTYHDLLKIIKDKDFLDNEENEDILEDIVLTLTLFEDREMIEERLKTYAHLFDDKVMKQLKRRRYTGWGRLSRKLINGIRDKQSGKTILDFLKSDGFANRNFMQLIHDDSLTFKEDIQKAQVSGQGDSLHEHIANLAGSPAIKKGILQTVKVVDELVKVMGRHKPENIVIEMARENQTTQKGQKNSRERMKRIEEGIKELGSQILKEHPVENTQLQNEKLYLYYLQNGRDMYVDQELDINRLSDYDVDHIVPQSFLKDDSIDNKVLTRSDKARGKSDNVPSEEVVKKMKNYWRQLLNAKLITQRKFDNLTKAERGGLSELDKAGFIKRQLVETRQITKHVAQILDSRMNTKYDENDKLIREVKVITLKSKLVSDFRKDFQFYKVREINNYHHAHDAYLNAVVGTALIKKYPKLESEFVYGDYKVYDVRKMIAKSEQEIGKATAKYFFYSNIMNFFKTEITLANGEIRKRPLIETNGETGEIVWDKGRDFATVRKVLSMPQVNIVKKTEVQTGGFSKESILPKRNSDKLIARKKDWDPKKYGGFDSPTVAYSVLVVAKVEKGKSKKLKSVKELLGITIMERSSFEKNPIDFLEAKGYKEVKKDLIIKLPKYSLFELENGRKRMLASAGELQKGNELALPSKYVNFLYLASHYEKLKGSPEDNEQKQLFVEQHKHYLDEIIEQISEFSKRVILADANLDKVLSAYNKHRDKPIREQAENIIHLFTLTNLGAPAAFKYFDTTIDRKRYTSTKEVLDATLIHQSITGLYETRIDLSQLGGDGGGGGPAPGSSGGTLNIEDEHRLHETSKEPDVSLGSTWLSDFPQAWAETGGMGLAVRQAPLIIPLKATSTPVSIKQYPMSQEARLGIKPHIQRLLDQGILVPCQSPWNTPLLPVKKPGTNDYRPVQDLREVNKRVEDIHPTVPNPYNLLSGLPPSHQWYTVLDLKDAFFCLRLHPTSQPLFAFEWRDPEMGISGQLTWTRLPQGFKNSPTLFNEALHRDLADFRIQHPDLILLQYVDDLLLAATSELDCQQGTRALLQTLGNLGYRASAKKAQICQKQVKYLGYLLKEGQRWLTEARKETVMGQPTPKTPRQLREFLGTAGFCRLWIPGFAEMAAPLYPLTKPGTLFNWGPDQQKAYQEIKQALLTAPALGLPDLTKPFELFVDEKQGYAKGVLTQKLGPWRRPVAYLSKKLDPVAAGWPPCLRMVAAIAVLTKDAGKLTMGQPLVILAPHAVEALVKQPPDRWLSNARMTHYQALLLDTDRVQFGPVVALNPATLLPLPEEGLQHNCLDILAEAHGTRPDLTDQPLPDADHTWYTDGSSLLQEGQRKAGAAVTTETEVIWAKALPAGTSAQRAELIALTQALKMAEGKKLNVYTDSRYAFATAHIHGEIYRRRGWLTSEGKEIKNKDEILALLKALFLPKRLSIIHCPGHQKGHSAEARGNRMADQAARKAAITETPDTSTLLAGKRTADGSEFEKRTADGSEFESPKKKAKVE

SEQ ID NO: 2774 - protein, 2093 aa, synthetic construct
  source 1..2093: note = Description of Artificial Sequence: Synthetic polypeptide
MPAAKRVKLDGGDKKYSIGLDIGTNSVGWAVITDEYKVPSKKFKVLGNTDRHSIKKNLIGALLFDSGETAEATRLKRTARRRYTRRKNRICYLQEIFSNEMAKVDDSFFHRLEESFLVEEDKKHERHPIFGNIVDEVAYHEKYPTIYHLRKKLVDSTDKADLRLIYLALAHMIKFRGHFLIEGDLNPDNSDVDKLFIQLVQTYNQLFEENPINASGVDAKAILSARLSKSRRLENLIAQLPGEKKNGLFGNLIALSLGLTPNFKSNFDLAEDAKLQLSKDTYDDDLDNLLAQIGDQYADLFLAAKNLSDAILLSDILRVNTEITKAPLSASMIKRYDEHHQDLTLLKALVRQQLPEKYKEIFFDQSKNGYAGYIDGGASQEEFYKFIKPILEKMDGTEELLVKLNREDLLRKQRTFDNGSIPHQIHLGELHAILRRQEDFYPFLKDNREKIEKILTFRIPYYVGPLARGNSRFAWMTRKSEETITPWNFEEVVDKGASAQSFIERMTNFDKNLPNEKVLPKHSLLYEYFTVYNELTKVKYVTEGMRKPAFLSGEQKKAIVDLLFKTNRKVTVKQLKEDYFKKIECFDSVEISGVEDRFNASLGTYHDLLKIIKDKDFLDNEENEDILEDIVLTLTLFEDREMIEERLKTYAHLFDDKVMKQLKRRRYTGWGRLSRKLINGIRDKQSGKTILDFLKSDGFANRNFMQLIHDDSLTFKEDIQKAQVSGQGDSLHEHIANLAGSPAIKKGILQTVKVVDELVKVMGRHKPENIVIEMARENQTTQKGQKNSRERMKRIEEGIKELGSQILKEHPVENTQLQNEKLYLYYLQNGRDMYVDQELDINRLSDYDVDHIVPQSFLKDDSIDNKVLTRSDKARGKSDNVPSEEVVKKMKNYWRQLLNAKLITQRKFDNLTKAERGGLSELDKAGFIKRQLVETRQITKHVAQILDSRMNTKYDENDKLIREVKVITLKSKLVSDFRKDFQFYKVREINNYHHAHDAYLNAVVGTALIKKYPKLESEFVYGDYKVYDVRKMIAKSEQEIGKATAKYFFYSNIMNFFKTEITLANGEIRKRPLIETNGETGEIVWDKGRDFATVRKVLSMPQVNIVKKTEVQTGGFSKESILPKRNSDKLIARKKDWDPKKYGGFDSPTVAYSVLVVAKVEKGKSKKLKSVKELLGITIMERSSFEKNPIDFLEAKGYKEVKKDLIIKLPKYSLFELENGRKRMLASAGELQKGNELALPSKYVNFLYLASHYEKLKGSPEDNEQKQLFVEQHKHYLDEIIEQISEFSKRVILADANLDKVLSAYNKHRDKPIREQAENIIHLFTLTNLGAPAAFKYFDTTIDRKRYTSTKEVLDATLIHQSITGLYETRIDLSQLGGDGGGGSEAAAKGGTLNIEDEHRLHETSKEPDVSLGSTWLSDFPQAWAETGGMGLAVRQAPLIIPLKATSTPVSIKQYPMSQEARLGIKPHIQRLLDQGILVPCQSPWNTPLLPVKKPGTNDYRPVQDLREVNKRVEDIHPTVPNPYNLLSGLPPSHQWYTVLDLKDAFFCLRLHPTSQPLFAFEWRDPEMGISGQLTWTRLPQGFKNSPTLFNEALHRDLADFRIQHPDLILLQYVDDLLLAATSELDCQQGTRALLQTLGNLGYRASAKKAQICQKQVKYLGYLLKEGQRWLTEARKETVMGQPTPKTPRQLREFLGTAGFCRLWIPGFAEMAAPLYPLTKPGTLFNWGPDQQKAYQEIKQALLTAPALGLPDLTKPFELFVDEKQGYAKGVLTQKLGPWRRPVAYLSKKLDPVAAGWPPCLRMVAAIAVLTKDAGKLTMGQPLVILAPHAVEALVKQPPDRWLSNARMTHYQALLLDTDRVQFGPVVALNPATLLPLPEEGLQHNCLDILAEAHGTRPDLTDQPLPDADHTWYTDGSSLLQEGQRKAGAAVTTETEVIWAKALPAGTSAQRAELIALTQALKMAEGKKLNVYTDSRYAFATAHIHGEIYRRRGWLTSEGKEIKNKDEILALLKALFLPKRLSIIHCPGHQKGHSAEARGNRMADQAARKAAITETPDTSTLLAGKRTADGSEFEKRTADGSEFESPKKKAKVE

SEQ ID NO: 2775 - protein, 2096 aa, synthetic construct
  source 1..2096: note = Description of Artificial Sequence: Synthetic polypeptide
MPAAKRVKLDGGDKKYSIGLDIGTNSVGWAVITDEYKVPSKKFKVLGNTDRHSIKKNLIGALLFDSGETAEATRLKRTARRRYTRRKNRICYLQEIFSNEMAKVDDSFFHRLEESFLVEEDKKHERHPIFGNIVDEVAYHEKYPTIYHLRKKLVDSTDKADLRLIYLALAHMIKFRGHFLIEGDLNPDNSDVDKLFIQLVQTYNQLFEENPINASGVDAKAILSARLSKSRRLENLIAQLPGEKKNGLFGNLIALSLGLTPNFKSNFDLAEDAKLQLSKDTYDDDLDNLLAQIGDQYADLFLAAKNLSDAILLSDILRVNTEITKAPLSASMIKRYDEHHQDLTLLKALVRQQLPEKYKEIFFDQSKNGYAGYIDGGASQEEFYKFIKPILEKMDGTEELLVKLNREDLLRKQRTFDNGSIPHQIHLGELHAILRRQEDFYPFLKDNREKIEKILTFRIPYYVGPLARGNSRFAWMTRKSEETITPWNFEEVVDKGASAQSFIERMTNFDKNLPNEKVLPKHSLLYEYFTVYNELTKVKYVTEGMRKPAFLSGEQKKAIVDLLFKTNRKVTVKQLKEDYFKKIECFDSVEISGVEDRFNASLGTYHDLLKIIKDKDFLDNEENEDILEDIVLTLTLFEDREMIEERLKTYAHLFDDKVMKQLKRRRYTGWGRLSRKLINGIRDKQSGKTILDFLKSDGFANRNFMQLIHDDSLTFKEDIQKAQVSGQGDSLHEHIANLAGSPAIKKGILQTVKVVDELVKVMGRHKPENIVIEMARENQTTQKGQKNSRERMKRIEEGIKELGSQILKEHPVENTQLQNEKLYLYYLQNGRDMYVDQELDINRLSDYDVDHIVPQSFLKDDSIDNKVLTRSDKARGKSDNVPSEEVVKKMKNYWRQLLNAKLITQRKFDNLTKAERGGLSELDKAGFIKRQLVETRQITKHVAQILDSRMNTKYDENDKLIREVKVITLKSKLVSDFRKDFQFYKVREINNYHHAHDAYLNAVVGTALIKKYPKLESEFVYGDYKVYDVRKMIAKSEQEIGKATAKYFFYSNIMNFFKTEITLANGEIRKRPLIETNGETGEIVWDKGRDFATVRKVLSMPQVNIVKKTEVQTGGFSKESILPKRNSDKLIARKKDWDPKKYGGFDSPTVAYSVLVVAKVEKGKSKKLKSVKELLGITIMERSSFEKNPIDFLEAKGYKEVKKDLIIKLPKYSLFELENGRKRMLASAGELQKGNELALPSKYVNFLYLASHYEKLKGSPEDNEQKQLFVEQHKHYLDEIIEQISEFSKRVILADANLDKVLSAYNKHRDKPIREQAENIIHLFTLTNLGAPAAFKYFDTTIDRKRYTSTKEVLDATLIHQSITGLYETRIDLSQLGGDGGGSSEAAAKPAPGGTLNIEDEHRLHETSKEPDVSLGSTWLSDFPQAWAETGGMGLAVRQAPLIIPLKATSTPVSIKQYPMSQEARLGIKPHIQRLLDQGILVPCQSPWNTPLLPVKKPGTNDYRPVQDLREVNKRVEDIHPTVPNPYNLLSGLPPSHQWYTVLDLKDAFFCLRLHPTSQPLFAFEWRDPEMGISGQLTWTRLPQGFKNSPTLFNEALHRDLADFRIQHPDLILLQYVDDLLLAATSELDCQQGTRALLQTLGNLGYRASAKKAQICQKQVKYLGYLLKEGQRWLTEARKETVMGQPTPKTPRQLREFLGTAGFCRLWIPGFAEMAAPLYPLTKPGTLFNWGPDQQKAYQEIKQALLTAPALGLPDLTKPFELFVDEKQGYAKGVLTQKLGPWRRPVAYLSKKLDPVAAGWPPCLRMVAAIAVLTKDAGKLTMGQPLVILAPHAVEALVKQPPDRWLSNARMTHYQALLLDTDRVQFGPVVALNPATLLPLPEEGLQHNCLDILAEAHGTRPDLTDQPLPDADHTWYTDGSSLLQEGQRKAGAAVTTETEVIWAKALPAGTSAQRAELIALTQALKMAEGKKLNVYTDSRYAFATAHIHGEIYRRRGWLTSEGKEIKNKDEILALLKALFLPKRLSIIHCPGHQKGHSAEARGNRMADQAARKAAITETPDTSTLLAGKRTADGSEFEKRTADGSEFESPKKKAKVE

SEQ ID NO: 2776 - protein, 2096 aa, synthetic construct
  source 1..2096: note = Description of Artificial Sequence: Synthetic polypeptide
MPAAKRVKLDGGDKKYSIGLDIGTNSVGWAVITDEYKVPSKKFKVLGNTDRHSIKKNLIGALLFDSGETAEATRLKRTARRRYTRRKNRICYLQEIFSNEMAKVDDSFFHRLEESFLVEEDKKHERHPIFGNIVDEVAYHEKYPTIYHLRKKLVDSTDKADLRLIYLALAHMIKFRGHFLIEGDLNPDNSDVDKLFIQLVQTYNQLFEENPINASGVDAKAILSARLSKSRRLENLIAQLPGEKKNGLFGNLIALSLGLTPNFKSNFDLAEDAKLQLSKDTYDDDLDNLLAQIGDQYADLFLAAKNLSDAILLSDILRVNTEITKAPLSASMIKRYDEHHQDLTLLKALVRQQLPEKYKEIFFDQSKNGYAGYIDGGASQEEFYKFIKPILEKMDGTEELLVKLNREDLLRKQRTFDNGSIPHQIHLGELHAILRRQEDFYPFLKDNREKIEKILTFRIPYYVGPLARGNSRFAWMTRKSEETITPWNFEEVVDKGASAQSFIERMTNFDKNLPNEKVLPKHSLLYEYFTVYNELTKVKYVTEGMRKPAFLSGEQKKAIVDLLFKTNRKVTVKQLKEDYFKKIECFDSVEISGVEDRFNASLGTYHDLLKIIKDKDFLDNEENEDILEDIVLTLTLFEDREMIEERLKTYAHLFDDKVMKQLKRRRYTGWGRLSRKLINGIRDKQSGKTILDFLKSDGFANRNFMQLIHDDSLTFKEDIQKAQVSGQGDSLHEHIANLAGSPAIKKGILQTVKVVDELVKVMGRHKPENIVIEMARENQTTQKGQKNSRERMKRIEEGIKELGSQILKEHPVENTQLQNEKLYLYYLQNGRDMYVDQELDINRLSDYDVDHIVPQSFLKDDSIDNKVLTRSDKARGKSDNVPSEEVVKKMKNYWRQLLNAKLITQRKFDNLTKAERGGLSELDKAGFIKRQLVETRQITKHVAQILDSRMNTKYDENDKLIREVKVITLKSKLVSDFRKDFQFYKVREINNYHHAHDAYLNAVVGTALIKKYPKLESEFVYGDYKVYDVRKMIAKSEQEIGKATAKYFFYSNIMNFFKTEITLANGEIRKRPLIETNGETGEIVWDKGRDFATVRKVLSMPQVNIVKKTEVQTGGFSKESILPKRNSDKLIARKKDWDPKKYGGFDSPTVAYSVLVVAKVEKGKSKKLKSVKELLGITIMERSSFEKNPIDFLEAKGYKEVKKDLIIKLPKYSLFELENGRKRMLASAGELQKGNELALPSKYVNFLYLASHYEKLKGSPEDNEQKQLFVEQHKHYLDEIIEQISEFSKRVILADANLDKVLSAYNKHRDKPIREQAENIIHLFTLTNLGAPAAFKYFDTTIDRKRYTSTKEVLDATLIHQSITGLYETRIDLSQLGGDGGGGSPAPEAAAKGGTLNIEDEHRLHETSKEPDVSLGSTWLSDFPQAWAETGGMGLAVRQAPLIIPLKATSTPVSIKQYPMSQEARLGIKPHIQRLLDQGILVPCQSPWNTPLLPVKKPGTNDYRPVQDLREVNKRVEDIHPTVPNPYNLLSGLPPSHQWYTVLDLKDAFFCLRLHPTSQPLFAFEWRDPEMGISGQLTWTRLPQGFKNSPTLFNEALHRDLADFRIQHPDLILLQYVDDLLLAATSELDCQQGTRALLQTLGNLGYRASAKKAQICQKQVKYLGYLLKEGQRWLTEARKETVMGQPTPKTPRQLREFLGTAGFCRLWIPGFAEMAAPLYPLTKPGTLFNWGPDQQKAYQEIKQALLTAPALGLPDLTKPFELFVDEKQGYAKGVLTQKLGPWRRPVAYLSKKLDPVAAGWPPCLRMVAAIAVLTKDAGKLTMGQPLVILAPHAVEALVKQPPDRWLSNARMTHYQALLLDTDRVQFGPVVALNPATLLPLPEEGLQHNCLDILAEAHGTRPDLTDQPLPDADHTWYTDGSSLLQEGQRKAGAAVTTETEVIWAKALPAGTSAQRAELIALTQALKMAEGKKLNVYTDSRYAFATAHIHGEIYRRRGWLTSEGKEIKNKDEILALLKALFLPKRLSIIHCPGHQKGHSAEARGNRMADQAARKAAITETPDTSTLLAGKRTADGSEFEKRTADGSEFESPKKKAKVE

SEQ ID NO: 2777 - protein, 2096 aa, synthetic construct
  source 1..2096: note = Description of Artificial Sequence: Synthetic polypeptide
MPAAKRVKLDGGDKKYSIGLDIGTNSVGWAVITDEYKVPSKKFKVLGNTDRHSIKKNLIGALLFDSGETAEATRLKRTARRRYTRRKNRICYLQEIFSNEMAKVDDSFFHRLEESFLVEEDKKHERHPIFGNIVDEVAYHEKYPTIYHLRKKLVDSTDKADLRLIYLALAHMIKFRGHFLIEGDLNPDNSDVDKLFIQLVQTYNQLFEENPINASGVDAKAILSARLSKSRRLENLIAQLPGEKKNGLFGNLIALSLGLTPNFKSNFDLAEDAKLQLSKDTYDDDLDNLLAQIGDQYADLFLAAKNLSDAILLSDILRVNTEITKAPLSASMIKRYDEHHQDLTLLKALVRQQLPEKYKEIFFDQSKNGYAGYIDGGASQEEFYKFIKPILEKMDGTEELLVKLNREDLLRKQRTFDNGSIPHQIHLGELHAILRRQEDFYPFLKDNREKIEKILTFRIPYYVGPLARGNSRFAWMTRKSEETITPWNFEEVVDKGASAQSFIERMTNFDKNLPNEKVLPKHSLLYEYFTVYNELTKVKYVTEGMRKPAFLSGEQKKAIVDLLFKTNRKVTVKQLKEDYFKKIECFDSVEISGVEDRFNASLGTYHDLLKIIKDKDFLDNEENEDILEDIVLTLTLFEDREMIEERLKTYAHLFDDKVMKQLKRRRYTGWGRLSRKLINGIRDKQSGKTILDFLKSDGFANRNFMQLIHDDSLTFKEDIQKAQVSGQGDSLHEHIANLAGSPAIKKGILQTVKVVDELVKVMGRHKPENIVIEMARENQTTQKGQKNSRERMKRIEEGIKELGSQILKEHPVENTQLQNEKLYLYYLQNGRDMYVDQELDINRLSDYDVDHIVPQSFLKDDSIDNKVLTRSDKARGKSDNVPSEEVVKKMKNYWRQLLNAKLITQRKFDNLTKAERGGLSELDKAGFIKRQLVETRQITKHVAQILDSRMNTKYDENDKLIREVKVITLKSKLVSDFRKDFQFYKVREINNYHHAHDAYLNAVVGTALIKKYPKLESEFVYGDYKVYDVRKMIAKSEQEIGKATAKYFFYSNIMNFFKTEITLANGEIRKRPLIETNGETGEIVWDKGRDFATVRKVLSMPQVNIVKKTEVQTGGFSKESILPKRNSDKLIARKKDWDPKKYGGFDSPTVAYSVLVVAKVEKGKSKKLKSVKELLGITIMERSSFEKNPIDFLEAKGYKEVKKDLIIKLPKYSLFELENGRKRMLASAGELQKGNELALPSKYVNFLYLASHYEKLKGSPEDNEQKQLFVEQHKHYLDEIIEQISEFSKRVILADANLDKVLSAYNKHRDKPIREQAENIIHLFTLTNLGAPAAFKYFDTTIDRKRYTSTKEVLDATLIHQSITGLYETRIDLSQLGGDGGGSSGGGEAAAKGGTLNIEDEHRLHETSKEPDVSLGSTWLSDFPQAWAETGGMGLAVRQAPLIIPLKATSTPVSIKQYPMSQEARLGIKPHIQRLLDQGILVPCQSPWNTPLLPVKKPGTNDYRPVQDLREVNKRVEDIHPTVPNPYNLLSGLPPSHQWYTVLDLKDAFFCLRLHPTSQPLFAFEWRDPEMGISGQLTWTRLPQGFKNSPTLFNEALHRDLADFRIQHPDLILLQYVDDLLLAATSELDCQQGTRALLQTLGNLGYRASAKKAQICQKQVKYLGYLLKEGQRWLTEARKETVMGQPTPKTPRQLREFLGTAGFCRLWIPGFAEMAAPLYPLTKPGTLFNWGPDQQKAYQEIKQALLTAPALGLPDLTKPFELFVDEKQGYAKGVLTQKLGPWRRPVAYLSKKLDPVAAGWPPCLRMVAAIAVLTKDAGKLTMGQPLVILAPHAVEALVKQPPDRWLSNARMTHYQALLLDTDRVQFGPVVALNPATLLPLPEEGLQHNCLDILAEAHGTRPDLTDQPLPDADHTWYTDGSSLLQEGQRKAGAAVTTETEVIWAKALPAGTSAQRAELIALTQALKMAEGKKLNVYTDSRYAFATAHIHGEIYRRRGWLTSEGKEIKNKDEILALLKALFLPKRLSIIHCPGHQKGHSAEARGNRMADQAARKAAITETPDTSTLLAGKRTADGSEFEKRTADGSEFESPKKKAKVE

SEQ ID NO: 2778 - protein, 2091 aa, synthetic construct
  source 1..2091: note = Description of Artificial Sequence: Synthetic polypeptide
MPAAKRVKLDGGDKKYSIGLDIGTNSVGWAVITDEYKVPSKKFKVLGNTDRHSIKKNLIGALLFDSGETAEATRLKRTARRRYTRRKNRICYLQEIFSNEMAKVDDSFFHRLEESFLVEEDKKHERHPIFGNIVDEVAYHEKYPTIYHLRKKLVDSTDKADLRLIYLALAHMIKFRGHFLIEGDLNPDNSDVDKLFIQLVQTYNQLFEENPINASGVDAKAILSARLSKSRRLENLIAQLPGEKKNGLFGNLIALSLGLTPNFKSNFDLAEDAKLQLSKDTYDDDLDNLLAQIGDQYADLFLAAKNLSDAILLSDILRVNTEITKAPLSASMIKRYDEHHQDLTLLKALVRQQLPEKYKEIFFDQSKNGYAGYIDGGASQEEFYKFIKPILEKMDGTEELLVKLNREDLLRKQRTFDNGSIPHQIHLGELHAILRRQEDFYPFLKDNREKIEKILTFRIPYYVGPLARGNSRFAWMTRKSEETITPWNFEEVVDKGASAQSFIERMTNFDKNLPNEKVLPKHSLLYEYFTVYNELTKVKYVTEGMRKPAFLSGEQKKAIVDLLFKTNRKVTVKQLKEDYFKKIECFDSVEISGVEDRFNASLGTYHDLLKIIKDKDFLDNEENEDILEDIVLTLTLFEDREMIEERLKTYAHLFDDKVMKQLKRRRYTGWGRLSRKLINGIRDKQSGKTILDFLKSDGFANRNFMQLIHDDSLTFKEDIQKAQVSGQGDSLHEHIANLAGSPAIKKGILQTVKVVDELVKVMGRHKPENIVIEMARENQTTQKGQKNSRERMKRIEEGIKELGSQILKEHPVENTQLQNEKLYLYYLQNGRDMYVDQELDINRLSDYDVDHIVPQSFLKDDSIDNKVLTRSDKARGKSDNVPSEEVVKKMKNYWRQLLNAKLITQRKFDNLTKAERGGLSELDKAGFIKRQLVETRQITKHVAQILDSRMNTKYDENDKLIREVKVITLKSKLVSDFRKDFQFYKVREINNYHHAHDAYLNAVVGTALIKKYPKLESEFVYGDYKVYDVRKMIAKSEQEIGKATAKYFFYSNIMNFFKTEITLANGEIRKRPLIETNGETGEIVWDKGRDFATVRKVLSMPQVNIVKKTEVQTGGFSKESILPKRNSDKLIARKKDWDPKKYGGFDSPTVAYSVLVVAKVEKGKSKKLKSVKELLGITIMERSSFEKNPIDFLEAKGYKEVKKDLIIKLPKYSLFELENGRKRMLASAGELQKGNELALPSKYVNFLYLASHYEKLKGSPEDNEQKQLFVEQHKHYLDEIIEQISEFSKRVILADANLDKVLSAYNKHRDKPIREQAENIIHLFTLTNLGAPAAFKYFDTTIDRKRYTSTKEVLDATLIHQSITGLYETRIDLSQLGGDGGGSSGGSGGTLNIEDEHRLHETSKEPDVSLGSTWLSDFPQAWAETGGMGLAVRQAPLIIPLKATSTPVSIKQYPMSQEARLGIKPHIQRLLDQGILVPCQSPWNTPLLPVKKPGTNDYRPVQDLREVNKRVEDIHPTVPNPYNLLSGLPPSHQWYTVLDLKDAFFCLRLHPTSQPLFAFEWRDPEMGISGQLTWTRLPQGFKNSPTLFNEALHRDLADFRIQHPDLILLQYVDDLLLAATSELDCQQGTRALLQTLGNLGYRASAKKAQICQKQVKYLGYLLKEGQRWLTEARKETVMGQPTPKTPRQLREFLGTAGFCRLWIPGFAEMAAPLYPLTKPGTLFNWGPDQQKAYQEIKQALLTAPALGLPDLTKPFELFVDEKQGYAKGVLTQKLGPWRRPVAYLSKKLDPVAAGWPPCLRMVAAIAVLTKDAGKLTMGQPLVILAPHAVEALVKQPPDRWLSNARMTHYQALLLDTDRVQFGPVVALNPATLLPLPEEGLQHNCLDILAEAHGTRPDLTDQPLPDADHTWYTDGSSLLQEGQRKAGAAVTTETEVIWAKALPAGTSAQRAELIALTQALKMAEGKKLNVYTDSRYAFATAHIHGEIYRRRGWLTSEGKEIKNKDEILALLKALFLPKRLSIIHCPGHQKGHSAEARGNRMADQAARKAAITETPDTSTLLAGKRTADGSEFEKRTADGSEFESPKKKAKVE

SEQ ID NO: 2779 - protein, 2091 aa, synthetic construct
  source 1..2091: note = Description of Artificial Sequence: Synthetic polypeptide
MPAAKRVKLDGGDKKYSIGLDIGTNSVGWAVITDEYKVPSKKFKVLGNTDRHSIKKNLIGALLFDSGETAEATRLKRTARRRYTRRKNRICYLQEIFSNEMAKVDDSFFHRLEESFLVEEDKKHERHPIFGNIVDEVAYHEKYPTIYHLRKKLVDSTDKADLRLIYLALAHMIKFRGHFLIEGDLNPDNSDVDKLFIQLVQTYNQLFEENPINASGVDAKAILSARLSKSRRLENLIAQLPGEKKNGLFGNLIALSLGLTPNFKSNFDLAEDAKLQLSKDTYDDDLDNLLAQIGDQYADLFLAAKNLSDAILLSDILRVNTEITKAPLSASMIKRYDEHHQDLTLLKALVRQQLPEKYKEIFFDQSKNGYAGYIDGGASQEEFYKFIKPILEKMDGTEELLVKLNREDLLRKQRTFDNGSIPHQIHLGELHAILRRQEDFYPFLKDNREKIEKILTFRIPYYVGPLARGNSRFAWMTRKSEETITPWNFEEVVDKGASAQSFIERMTNFDKNLPNEKVLPKHSLLYEYFTVYNELTKVKYVTEGMRKPAFLSGEQKKAIVDLLFKTNRKVTVKQLKEDYFKKIECFDSVEISGVEDRFNASLGTYHDLLKIIKDKDFLDNEENEDILEDIVLTLTLFEDREMIEERLKTYAHLFDDKVMKQLKRRRYTGWGRLSRKLINGIRDKQSGKTILDFLKSDGFANRNFMQLIHDDSLTFKEDIQKAQVSGQGDSLHEHIANLAGSPAIKKGILQTVKVVDELVKVMGRHKPENIVIEMARENQTTQKGQKNSRERMKRIEEGIKELGSQILKEHPVENTQLQNEKLYLYYLQNGRDMYVDQELDINRLSDYDVDHIVPQSFLKDDSIDNKVLTRSDKARGKSDNVPSEEVVKKMKNYWRQLLNAKLITQRKFDNLTKAERGGLSELDKAGFIKRQLVETRQITKHVAQILDSRMNTKYDENDKLIREVKVITLKSKLVSDFRKDFQFYKVREINNYHHAHDAYLNAVVGTALIKKYPKLESEFVYGDYKVYDVRKMIAKSEQEIGKATAKYFFYSNIMNFFKTEITLANGEIRKRPLIETNGETGEIVWDKGRDFATVRKVLSMPQVNIVKKTEVQTGGFSKESILPKRNSDKLIARKKDWDPKKYGGFDSPTVAYSVLVVAKVEKGKSKKLKSVKELLGITIMERSSFEKNPIDFLEAKGYKEVKKDLIIKLPKYSLFELENGRKRMLASAGELQKGNELALPSKYVNFLYLASHYEKLKGSPEDNEQKQLFVEQHKHYLDEIIEQISEFSKRVILADANLDKVLSAYNKHRDKPIREQAENIIHLFTLTNLGAPAAFKYFDTTIDRKRYTSTKEVLDATLIHQSITGLYETRIDLSQLGGDGGGSSGSSGGTLNIEDEHRLHETSKEPDVSLGSTWLSDFPQAWAETGGMGLAVRQAPLIIPLKATSTPVSIKQYPMSQEARLGIKPHIQRLLDQGILVPCQSPWNTPLLPVKKPGTNDYRPVQDLREVNKRVEDIHPTVPNPYNLLSGLPPSHQWYTVLDLKDAFFCLRLHPTSQPLFAFEWRDPEMGISGQLTWTRLPQGFKNSPTLFNEALHRDLADFRIQHPDLILLQYVDDLLLAATSELDCQQGTRALLQTLGNLGYRASAKKAQICQKQVKYLGYLLKEGQRWLTEARKETVMGQPTPKTPRQLREFLGTAGFCRLWIPGFAEMAAPLYPLTKPGTLFNWGPDQQKAYQEIKQALLTAPALGLPDLTKPFELFVDEKQGYAKGVLTQKLGPWRRPVAYLSKKLDPVAAGWPPCLRMVAAIAVLTKDAGKLTMGQPLVILAPHAVEALVKQPPDRWLSNARMTHYQALLLDTDRVQFGPVVALNPATLLPLPEEGLQHNCLDILAEAHGTRPDLTDQPLPDADHTWYTDGSSLLQEGQRKAGAAVTTETEVIWAKALPAGTSAQRAELIALTQALKMAEGKKLNVYTDSRYAFATAHIHGEIYRRRGWLTSEGKEIKNKDEILALLKALFLPKRLSIIHCPGHQKGHSAEARGNRMADQAARKAAITETPDTSTLLAGKRTADGSEFEKRTADGSEFESPKKKAKVE

SEQ ID NO: 2780 - protein, 2091 aa, synthetic construct
  source 1..2091: note = Description of Artificial Sequence: Synthetic polypeptide
MPAAKRVKLDGGDKKYSIGLDIGTNSVGWAVITDEYKVPSKKFKVLGNTDRHSIKKNLIGALLFDSGETAEATRLKRTARRRYTRRKNRICYLQEIFSNEMAKVDDSFFHRLEESFLVEEDKKHERHPIFGNIVDEVAYHEKYPTIYHLRKKLVDSTDKADLRLIYLALAHMIKFRGHFLIEGDLNPDNSDVDKLFIQLVQTYNQLFEENPINASGVDAKAILSARLSKSRRLENLIAQLPGEKKNGLFGNLIALSLGLTPNFKSNFDLAEDAKLQLSKDTYDDDLDNLLAQIGDQYADLFLAAKNLSDAILLSDILRVNTEITKAPLSASMIKRYDEHHQDLTLLKALVRQQLPEKYKEIFFDQSKNGYAGYIDGGASQEEFYKFIKPILEKMDGTEELLVKLNREDLLRKQRTFDNGSIPHQIHLGELHAILRRQEDFYPFLKDNREKIEKILTFRIPYYVGPLARGNSRFAWMTRKSEETITPWNFEEVVDKGASAQSFIERMTNFDKNLPNEKVLPKHSLLYEYFTVYNELTKVKYVTEGMRKPAFLSGEQKKAIVDLLFKTNRKVTVKQLKEDYFKKIECFDSVEISGVEDRFNASLGTYHDLLKIIKDKDFLDNEENEDILEDIVLTLTLFEDREMIEERLKTYAHLFDDKVMKQLKRRRYTGWGRLSRKLINGIRDKQSGKTILDFLKSDGFANRNFMQLIHDDSLTFKEDIQKAQVSGQGDSLHEHIANLAGSPAIKKGILQTVKVVDELVKVMGRHKPENIVIEMARENQTTQKGQKNSRERMKRIEEGIKELGSQILKEHPVENTQLQNEKLYLYYLQNGRDMYVDQELDINRLSDYDVDHIVPQSFLKDDSIDNKVLTRSDKARGKSDNVPSEEVVKKMKNYWRQLLNAKLITQRKFDNLTKAERGGLSELDKAGFIKRQLVETRQITKHVAQILDSRMNTKYDENDKLIREVKVITLKSKLVSDFRKDFQFYKVREINNYHHAHDAYLNAVVGTALIKKYPKLESEFVYGDYKVYDVRKMIAKSEQEIGKATAKYFFYSNIMNFFKTEITLANGEIRKRPLIETNGETGEIVWDKGRDFATVRKVLSMPQVNIVKKTEVQTGGFSKESILPKRNSDKLIARKKDWDPKKYGGFDSPTVAYSVLVVAKVEKGKSKKLKSVKELLGITIMERSSFEKNPIDFLEAKGYKEVKKDLIIKLPKYSLFELENGRKRMLASAGELQKGNELALPSKYVNFLYLASHYEKLKGSPEDNEQKQLFVEQHKHYLDEIIEQISEFSKRVILADANLDKVLSAYNKHRDKPIREQAENIIHLFTLTNLGAPAAFKYFDTTIDRKRYTSTKEVLDATLIHQSITGLYETRIDLSQLGGDGGGGGGGSGGTLNIEDEHRLHETSKEPDVSLGSTWLSDFPQAWAETGGMGLAVRQAPLIIPLKATSTPVSIKQYPMSQEARLGIKPHIQRLLDQGILVPCQSPWNTPLLPVKKPGTNDYRPVQDLREVNKRVEDIHPTVPNPYNLLSGLPPSHQWYTVLDLKDAFFCLRLHPTSQPLFAFEWRDPEMGISGQLTWTRLPQGFKNSPTLFNEALHRDLADFRIQHPDLILLQYVDDLLLAATSELDCQQGTRALLQTLGNLGYRASAKKAQICQKQVKYLGYLLKEGQRWLTEARKETVMGQPTPKTPRQLREFLGKAGFCRLFIPGFAEMAAPLYPLTKPGTLFNWGPDQQKAYQEIKQALLTAPALGLPDLTKPFELFVDEKQGYAKGVLTQKLGPWRRPVAYLSKKLDPVAAGWPPCLRMVAAIAVLTKDAGKLTMGQPLVILAPHAVEALVKQPPDRWLSNARMTHYQALLLDTDRVQFGPVVALNPATLLPLPEEGLQHNCLDILAEAHGTRPDLTDQPLPDADHTWYTDGSSLLQEGQRKAGAAVTTETEVIWAKALPAGTSAQRAELIALTQALKMAEGKKLNVYTDSRYAFATAHIHGEIYRRRGWLTSEGKEIKNKDEILALLKALFLPKRLSIIHCPGHQKGHSAEARGNRMADQAARKAAITETPDTSTLLAGKRTADGSEFEKRTADGSEFESPKKKAKVE

SEQ ID NO: 2781 - protein, 2096 aa, synthetic construct
  source 1..2096: note = Description of Artificial Sequence: Synthetic polypeptide
MPAAKRVKLDGGDKKYSIGLDIGTNSVGWAVITDEYKVPSKKFKVLGNTDRHSIKKNLIGALLFDSGETAEATRLKRTARRRYTRRKNRICYLQEIFSNEMAKVDDSFFHRLEESFLVEEDKKHERHPIFGNIVDEVAYHEKYPTIYHLRKKLVDSTDKADLRLIYLALAHMIKFRGHFLIEGDLNPDNSDVDKLFIQLVQTYNQLFEENPINASGVDAKAILSARLSKSRRLENLIAQLPGEKKNGLFGNLIALSLGLTPNFKSNFDLAEDAKLQLSKDTYDDDLDNLLAQIGDQYADLFLAAKNLSDAILLSDILRVNTEITKAPLSASMIKRYDEHHQDLTLLKALVRQQLPEKYKEIFFDQSKNGYAGYIDGGASQEEFYKFIKPILEKMDGTEELLVKLNREDLLRKQRTFDNGSIPHQIHLGELHAILRRQEDFYPFLKDNREKIEKILTFRIPYYVGPLARGNSRFAWMTRKSEETITPWNFEEVVDKGASAQSFIERMTNFDKNLPNEKVLPKHSLLYEYFTVYNELTKVKYVTEGMRKPAFLSGEQKKAIVDLLFKTNRKVTVKQLKEDYFKKIECFDSVEISGVEDRFNASLGTYHDLLKIIKDKDFLDNEENEDILEDIVLTLTLFEDREMIEERLKTYAHLFDDKVMKQLKRRRYTGWGRLSRKLINGIRDKQSGKTILDFLKSDGFANRNFMQLIHDDSLTFKEDIQKAQVSGQGDSLHEHIANLAGSPAIKKGILQTVKVVDELVKVMGRHKPENIVIEMARENQTTQKGQKNSRERMKRIEEGIKELGSQILKEHPVENTQLQNEKLYLYYLQNGRDMYVDQELDINRLSDYDVDHIVPQSFLKDDSIDNKVLTRSDKARGKSDNVPSEEVVKKMKNYWRQLLNAKLITQRKFDNLTKAERGGLSELDKAGFIKRQLVETRQITKHVAQILDSRMNTKYDENDKLIREVKVITLKSKLVSDFRKDFQFYKVREINNYHHAHDAYLNAVVGTALIKKYPKLESEFVYGDYKVYDVRKMIAKSEQEIGKATAKYFFYSNIMNFFKTEITLANGEIRKRPLIETNGETGEIVWDKGRDFATVRKVLSMPQVNIVKKTEVQTGGFSKESILPKRNSDKLIARKKDWDPKKYGGFDSPTVAYSVLVVAKVEKGKSKKLKSVKELLGITIMERSSFEKNPIDFLEAKGYKEVKKDLIIKLPKYSLFELENGRKRMLASAGELQKGNELALPSKYVNFLYLASHYEKLKGSPEDNEQKQLFVEQHKHYLDEIIEQISEFSKRVILADANLDKVLSAYNKHRDKPIREQAENIIHLFTLTNLGAPAAFKYFDTTIDRKRYTSTKEVLDATLIHQSITGLYETRIDLSQLGGDGGEAAAKPAPGSSGGTLNIEDEHRLHETSKEPDVSLGSTWLSDFPQAWAETGGMGLAVRQAPLIIPLKATSTPVSIKQYPMSQEARLGIKPHIQRLLDQGILVPCQSPWNTPLLPVKKPGTNDYRPVQDLREVNKRVEDIHPTVPNPYNLLSGLPPSHQWYTVLDLKDAFFCLRLHPTSQPLFAFEWRDPEMGISGQLTWTRLPQGFKNSPTLFNEALHRDLADFRIQHPDLILLQYVDDLLLAATSELDCQQGTRALLQTLGNLGYRASAKKAQICQKQVKYLGYLLKEGQRWLTEARKETVMGQPTPKTPRQLREFLGKAGFCRLFIPGFAEMAAPLYPLTKPGTLFNWGPDQQKAYQEIKQALLTAPALGLPDLTKPFELFVDEKQGYAKGVLTQKLGPWRRPVAYLSKKLDPVAAGWPPCLRMVAAIAVLTKDAGKLTMGQPLVILAPHAVEALVKQPPDRWLSNARMTHYQALLLDTDRVQFGPVVALNPATLLPLPEEGLQHNCLDILAEAHGTRPDLTDQPLPDADHTWYTDGSSLLQEGQRKAGAAVTTETEVIWAKALPAGTSAQRAELIALTQALKMAEGKKLNVYTDSRYAFATAHIHGEIYRRRGWLTSEGKEIKNKDEILALLKALFLPKRLSIIHCPGHQKGHSAEARGNRMADQAARKAAITETPDTSTLLAGKRTADGSEFEKRTADGSEFESPKKKAKVE

SEQ ID NO: 2782 - protein, 2096 aa, synthetic construct
  source 1..2096: note = Description of Artificial Sequence: Synthetic polypeptide
MPAAKRVKLDGGDKKYSIGLDIGTNSVGWAVITDEYKVPSKKFKVLGNTDRHSIKKNLIGALLFDSGETAEATRLKRTARRRYTRRKNRICYLQEIFSNEMAKVDDSFFHRLEESFLVEEDKKHERHPIFGNIVDEVAYHEKYPTIYHLRKKLVDSTDKADLRLIYLALAHMIKFRGHFLIEGDLNPDNSDVDKLFIQLVQTYNQLFEENPINASGVDAKAILSARLSKSRRLENLIAQLPGEKKNGLFGNLIALSLGLTPNFKSNFDLAEDAKLQLSKDTYDDDLDNLLAQIGDQYADLFLAAKNLSDAILLSDILRVNTEITKAPLSASMIKRYDEHHQDLTLLKALVRQQLPEKYKEIFFDQSKNGYAGYIDGGASQEEFYKFIKPILEKMDGTEELLVKLNREDLLRKQRTFDNGSIPHQIHLGELHAILRRQEDFYPFLKDNREKIEKILTFRIPYYVGPLARGNSRFAWMTRKSEETITPWNFEEVVDKGASAQSFIERMTNFDKNLPNEKVLPKHSLLYEYFTVYNELTKVKYVTEGMRKPAFLSGEQKKAIVDLLFKTNRKVTVKQLKEDYFKKIECFDSVEISGVEDRFNASLGTYHDLLKIIKDKDFLDNEENEDILEDIVLTLTLFEDREMIEERLKTYAHLFDDKVMKQLKRRRYTGWGRLSRKLINGIRDKQSGKTILDFLKSDGFANRNFMQLIHDDSLTFKEDIQKAQVSGQGDSLHEHIANLAGSPAIKKGILQTVKVVDELVKVMGRHKPENIVIEMARENQTTQKGQKNSRERMKRIEEGIKELGSQILKEHPVENTQLQNEKLYLYYLQNGRDMYVDQELDINRLSDYDVDHIVPQSFLKDDSIDNKVLTRSDKARGKSDNVPSEEVVKKMKNYWRQLLNAKLITQRKFDNLTKAERGGLSELDKAGFIKRQLVETRQITKHVAQILDSRMNTKYDENDKLIREVKVITLKSKLVSDFRKDFQFYKVREINNYHHAHDAYLNAVVGTALIKKYPKLESEFVYGDYKVYDVRKMIAKSEQEIGKATAKYFFYSNIMNFFKTEITLANGEIRKRPLIETNGETGEIVWDKGRDFATVRKVLSMPQVNIVKKTEVQTGGFSKESILPKRNSDKLIARKKDWDPKKYGGFDSPTVAYSVLVVAKVEKGKSKKLKSVKELLGITIMERSSFEKNPIDFLEAKGYKEVKKDLIIKLPKYSLFELENGRKRMLASAGELQKGNELALPSKYVNFLYLASHYEKLKGSPEDNEQKQLFVEQHKHYLDEIIEQISEFSKRVILADANLDKVLSAYNKHRDKPIREQAENIIHLFTLTNLGAPAAFKYFDTTIDRKRYTSTKEVLDATLIHQSITGLYETRIDLSQLGGDGGEAAAKGGSPAPGGTLNIEDEHRLHETSKEPDVSLGSTWLSDFPQAWAETGGMGLAVRQAPLIIPLKATSTPVSIKQYPMSQEARLGIKPHIQRLLDQGILVPCQSPWNTPLLPVKKPGTNDYRPVQDLREVNKRVEDIHPTVPNPYNLLSGLPPSHQWYTVLDLKDAFFCLRLHPTSQPLFAFEWRDPEMGISGQLTWTRLPQGFKNSPTLFNEALHRDLADFRIQHPDLILLQYVDDLLLAATSELDCQQGTRALLQTLGNLGYRASAKKAQICQKQVKYLGYLLKEGQRWLTEARKETVMGQPTPKTPRQLREFLGKAGFCRLFIPGFAEMAAPLYPLTKPGTLFNWGPDQQKAYQEIKQALLTAPALGLPDLTKPFELFVDEKQGYAKGVLTQKLGPWRRPVAYLSKKLDPVAAGWPPCLRMVAAIAVLTKDAGKLTMGQPLVILAPHAVEALVKQPPDRWLSNARMTHYQALLLDTDRVQFGPVVALNPATLLPLPEEGLQHNCLDILAEAHGTRPDLTDQPLPDADHTWYTDGSSLLQEGQRKAGAAVTTETEVIWAKALPAGTSAQRAELIALTQALKMAEGKKLNVYTDSRYAFATAHIHGEIYRRRGWLTSEGKEIKNKDEILALLKALFLPKRLSIIHCPGHQKGHSAEARGNRMADQAARKAAITETPDTSTLLAGKRTADGSEFEKRTADGSEFESPKKKAKVE

SEQ ID NO: 2783 - protein, 2093 aa, synthetic construct
  source 1..2093: note = Description of Artificial Sequence: Synthetic polypeptide
MPAAKRVKLDGGDKKYSIGLDIGTNSVGWAVITDEYKVPSKKFKVLGNTDRHSIKKNLIGALLFDSGETAEATRLKRTARRRYTRRKNRICYLQEIFSNEMAKVDDSFFHRLEESFLVEEDKKHERHPIFGNIVDEVAYHEKYPTIYHLRKKLVDSTDKADLRLIYLALAHMIKFRGHFLIEGDLNPDNSDVDKLFIQLVQTYNQLFEENPINASGVDAKAILSARLSKSRRLENLIAQLPGEKKNGLFGNLIALSLGLTPNFKSNFDLAEDAKLQLSKDTYDDDLDNLLAQIGDQYADLFLAAKNLSDAILLSDILRVNTEITKAPLSASMIKRYDEHHQDLTLLKALVRQQLPEKYKEIFFDQSKNGYAGYIDGGASQEEFYKFIKPILEKMDGTEELLVKLNREDLLRKQRTFDNGSIPHQIHLGELHAILRRQEDFYPFLKDNREKIEKILTFRIPYYVGPLARGNSRFAWMTRKSEETITPWNFEEVVDKGASAQSFIERMTNFDKNLPNEKVLPKHSLLYEYFTVYNELTKVKYVTEGMRKPAFLSGEQKKAIVDLLFKTNRKVTVKQLKEDYFKKIECFDSVEISGVEDRFNASLGTYHDLLKIIKDKDFLDNEENEDILEDIVLTLTLFEDREMIEERLKTYAHLFDDKVMKQLKRRRYTGWGRLSRKLINGIRDKQSGKTILDFLKSDGFANRNFMQLIHDDSLTFKEDIQKAQVSGQGDSLHEHIANLAGSPAIKKGILQTVKVVDELVKVMGRHKPENIVIEMARENQTTQKGQKNSRERMKRIEEGIKELGSQILKEHPVENTQLQNEKLYLYYLQNGRDMYVDQELDINRLSDYDVDHIVPQSFLKDDSIDNKVLTRSDKARGKSDNVPSEEVVKKMKNYWRQLLNAKLITQRKFDNLTKAERGGLSELDKAGFIKRQLVETRQITKHVAQILDSRMNTKYDENDKLIREVKVITLKSKLVSDFRKDFQFYKVREINNYHHAHDAYLNAVVGTALIKKYPKLESEFVYGDYKVYDVRKMIAKSEQEIGKATAKYFFYSNIMNFFKTEITLANGEIRKRPLIETNGETGEIVWDKGRDFATVRKVLSMPQVNIVKKTEVQTGGFSKESILPKRNSDKLIARKKDWDPKKYGGFDSPTVAYSVLVVAKVEKGKSKKLKSVKELLGITIMERSSFEKNPIDFLEAKGYKEVKKDLIIKLPKYSLFELENGRKRMLASAGELQKGNELALPSKYVNFLYLASHYEKLKGSPEDNEQKQLFVEQHKHYLDEIIEQISEFSKRVILADANLDKVLSAYNKHRDKPIREQAENIIHLFTLTNLGAPAAFKYFDTTIDRKRYTSTKEVLDATLIHQSITGLYETRIDLSQLGGDGGEAAAKGGSGGTLNIEDEHRLHETSKEPDVSLGSTWLSDFPQAWAETGGMGLAVRQAPLIIPLKATSTPVSIKQYPMSQEARLGIKPHIQRLLDQGILVPCQSPWNTPLLPVKKPGTNDYRPVQDLREVNKRVEDIHPTVPNPYNLLSGLPPSHQWYTVLDLKDAFFCLRLHPTSQPLFAFEWRDPEMGISGQLTWTRLPQGFKNSPTLFNEALHRDLADFRIQHPDLILLQYVDDLLLAATSELDCQQGTRALLQTLGNLGYRASAKKAQICQKQVKYLGYLLKEGQRWLTEARKETVMGQPTPKTPRQLREFLGKAGFCRLFIPGFAEMAAPLYPLTKPGTLFNWGPDQQKAYQEIKQALLTAPALGLPDLTKPFELFVDEKQGYAKGVLTQKLGPWRRPVAYLSKKLDPVAAGWPPCLRMVAAIAVLTKDAGKLTMGQPLVILAPHAVEALVKQPPDRWLSNARMTHYQALLLDTDRVQFGPVVALNPATLLPLPEEGLQHNCLDILAEAHGTRPDLTDQPLPDADHTWYTDGSSLLQEGQRKAGAAVTTETEVIWAKALPAGTSAQRAELIALTQALKMAEGKKLNVYTDSRYAFATAHIHGEIYRRRGWLTSEGKEIKNKDEILALLKALFLPKRLSIIHCPGHQKGHSAEARGNRMADQAARKAAITETPDTSTLLAGKRTADGSEFEKRTADGSEFESPKKKAKVE

SEQ ID NO: 2784 - protein, 2131 aa, synthetic construct
  source 1..2131: note = Description of Artificial Sequence: Synthetic polypeptide
MPAAKRVKLDGGDKKYSIGLDIGTNSVGWAVITDEYKVPSKKFKVLGNTDRHSIKKNLIGALLFDSGETAEATRLKRTARRRYTRRKNRICYLQEIFSNEMAKVDDSFFHRLEESFLVEEDKKHERHPIFGNIVDEVAYHEKYPTIYHLRKKLVDSTDKADLRLIYLALAHMIKFRGHFLIEGDLNPDNSDVDKLFIQLVQTYNQLFEENPINASGVDAKAILSARLSKSRRLENLIAQLPGEKKNGLFGNLIALSLGLTPNFKSNFDLAEDAKLQLSKDTYDDDLDNLLAQIGDQYADLFLAAKNLSDAILLSDILRVNTEITKAPLSASMIKRYDEHHQDLTLLKALVRQQLPEKYKEIFFDQSKNGYAGYIDGGASQEEFYKFIKPILEKMDGTEELLVKLNREDLLRKQRTFDNGSIPHQIHLGELHAILRRQEDFYPFLKDNREKIEKILTFRIPYYVGPLARGNSRFAWMTRKSEETITPWNFEEVVDKGASAQSFIERMTNFDKNLPNEKVLPKHSLLYEYFTVYNELTKVKYVTEGMRKPAFLSGEQKKAIVDLLFKTNRKVTVKQLKEDYFKKIECFDSVEISGVEDRFNASLGTYHDLLKIIKDKDFLDNEENEDILEDIVLTLTLFEDREMIEERLKTYAHLFDDKVMKQLKRRRYTGWGRLSRKLINGIRDKQSGKTILDFLKSDGFANRNFMQLIHDDSLTFKEDIQKAQVSGQGDSLHEHIANLAGSPAIKKGILQTVKVVDELVKVMGRHKPENIVIEMARENQTTQKGQKNSRERMKRIEEGIKELGSQILKEHPVENTQLQNEKLYLYYLQNGRDMYVDQELDINRLSDYDVDHIVPQSFLKDDSIDNKVLTRSDKARGKSDNVPSEEVVKKMKNYWRQLLNAKLITQRKFDNLTKAERGGLSELDKAGFIKRQLVETRQITKHVAQILDSRMNTKYDENDKLIREVKVITLKSKLVSDFRKDFQFYKVREINNYHHAHDAYLNAVVGTALIKKYPKLESEFVYGDYKVYDVRKMIAKSEQEIGKATAKYFFYSNIMNFFKTEITLANGEIRKRPLIETNGETGEIVWDKGRDFATVRKVLSMPQVNIVKKTEVQTGGFSKESILPKRNSDKLIARKKDWDPKKYGGFDSPTVAYSVLVVAKVEKGKSKKLKSVKELLGITIMERSSFEKNPIDFLEAKGYKEVKKDLIIKLPKYSLFELENGRKRMLASAGELQKGNELALPSKYVNFLYLASHYEKLKGSPEDNEQKQLFVEQHKHYLDEIIEQISEFSKRVILADANLDKVLSAYNKHRDKPIREQAENIIHLFTLTNLGAPAAFKYFDTTIDRKRYTSTKEVLDATLIHQSITGLYETRIDLSQLGGDGGAEAAAKEAAAKEAAAKEAAAKALEAEAAAKEAAAKEAAAKEAAAKAGGTLNIEDEHRLHETSKEPDVSLGSTWLSDFPQAWAETGGMGLAVRQAPLIIPLKATSTPVSIKQYPMSQEARLGIKPHIQRLLDQGILVPCQSPWNTPLLPVKKPGTNDYRPVQDLREVNKRVEDIHPTVPNPYNLLSGLPPSHQWYTVLDLKDAFFCLRLHPTSQPLFAFEWRDPEMGISGQLTWTRLPQGFKNSPTLFNEALHRDLADFRIQHPDLILLQYVDDLLLAATSELDCQQGTRALLQTLGNLGYRASAKKAQICQKQVKYLGYLLKEGQRWLTEARKETVMGQPTPKTPRQLREFLGKAGFCRLFIPGFAEMAAPLYPLTKPGTLFNWGPDQQKAYQEIKQALLTAPALGLPDLTKPFELFVDEKQGYAKGVLTQKLGPWRRPVAYLSKKLDPVAAGWPPCLRMVAAIAVLTKDAGKLTMGQPLVILAPHAVEALVKQPPDRWLSNARMTHYQALLLDTDRVQFGPVVALNPATLLPLPEEGLQHNCLDILAEAHGTRPDLTDQPLPDADHTWYTDGSSLLQEGQRKAGAAVTTETEVIWAKALPAGTSAQRAELIALTQALKMAEGKKLNVYTDSRYAFATAHIHGEIYRRRGWLTSEGKEIKNKDEILALLKALFLPKRLSIIHCPGHQKGHSAEARGNRMADQAARKAAITETPDTSTLLAGKRTADGSEFEKRTADGSEFESPKKKAKVE

SEQ ID NO: 2785 - protein, 2096 aa, synthetic construct
  source 1..2096: note = Description of Artificial Sequence: Synthetic polypeptide
MPAAKRVKLDGGDKKYSIGLDIGTNSVGWAVITDEYKVPSKKFKVLGNTDRHSIKKNLIGALLFDSGETAEATRLKRTARRRYTRRKNRICYLQEIFSNEMAKVDDSFFHRLEESFLVEEDKKHERHPIFGNIVDEVAYHEKYPTIYHLRKKLVDSTDKADLRLIYLALAHMIKFRGHFLIEGDLNPDNSDVDKLFIQLVQTYNQLFEENPINASGVDAKAILSARLSKSRRLENLIAQLPGEKKNGLFGNLIALSLGLTPNFKSNFDLAEDAKLQLSKDTYDDDLDNLLAQIGDQYADLFLAAKNLSDAILLSDILRVNTEITKAPLSASMIKRYDEHHQDLTLLKALVRQQLPEKYKEIFFDQSKNGYAGYIDGGASQEEFYKFIKPILEKMDGTEELLVKLNREDLLRKQRTFDNGSIPHQIHLGELHAILRRQEDFYPFLKDNREKIEKILTFRIPYYVGPLARGNSRFAWMTRKSEETITPWNFEEVVDKGASAQSFIERMTNFDKNLPNEKVLPKHSLLYEYFTVYNELTKVKYVTEGMRKPAFLSGEQKKAIVDLLFKTNRKVTVKQLKEDYFKKIECFDSVEISGVEDRFNASLGTYHDLLKIIKDKDFLDNEENEDILEDIVLTLTLFEDREMIEERLKTYAHLFDDKVMKQLKRRRYTGWGRLSRKLINGIRDKQSGKTILDFLKSDGFANRNFMQLIHDDSLTFKEDIQKAQVSGQGDSLHEHIANLAGSPAIKKGILQTVKVVDELVKVMGRHKPENIVIEMARENQTTQKGQKNSRERMKRIEEGIKELGSQILKEHPVENTQLQNEKLYLYYLQNGRDMYVDQELDINRLSDYDVDHIVPQSFLKDDSIDNKVLTRSDKARGKSDNVPSEEVVKKMKNYWRQLLNAKLITQRKFDNLTKAERGGLSELDKAGFIKRQLVETRQITKHVAQILDSRMNTKYDENDKLIREVKVITLKSKLVSDFRKDFQFYKVREINNYHHAHDAYLNAVVGTALIKKYPKLESEFVYGDYKVYDVRKMIAKSEQEIGKATAKYFFYSNIMNFFKTEITLANGEIRKRPLIETNGETGEIVWDKGRDFATVRKVLSMPQVNIVKKTEVQTGGFSKESILPKRNSDKLIARKKDWDPKKYGGFDSPTVAYSVLVVAKVEKGKSKKLKSVKELLGITIMERSSFEKNPIDFLEAKGYKEVKKDLIIKLPKYSLFELENGRKRMLASAGELQKGNELALPSKYVNFLYLASHYEKLKGSPEDNEQKQLFVEQHKHYLDEIIEQISEFSKRVILADANLDKVLSAYNKHRDKPIREQAENIIHLFTLTNLGAPAAFKYFDTTIDRKRYTSTKEVLDATLIHQSITGLYETRIDLSQLGGDGGEAAAKGSSGGGGGTLNIEDEHRLHETSKEPDVSLGSTWLSDFPQAWAETGGMGLAVRQAPLIIPLKATSTPVSIKQYPMSQEARLGIKPHIQRLLDQGILVPCQSPWNTPLLPVKKPGTNDYRPVQDLREVNKRVEDIHPTVPNPYNLLSGLPPSHQWYTVLDLKDAFFCLRLHPTSQPLFAFEWRDPEMGISGQLTWTRLPQGFKNSPTLFNEALHRDLADFRIQHPDLILLQYVDDLLLAATSELDCQQGTRALLQTLGNLGYRASAKKAQICQKQVKYLGYLLKEGQRWLTEARKETVMGQPTPKTPRQLREFLGKAGFCRLFIPGFAEMAAPLYPLTKPGTLFNWGPDQQKAYQEIKQALLTAPALGLPDLTKPFELFVDEKQGYAKGVLTQKLGPWRRPVAYLSKKLDPVAAGWPPCLRMVAAIAVLTKDAGKLTMGQPLVILAPHAVEALVKQPPDRWLSNARMTHYQALLLDTDRVQFGPVVALNPATLLPLPEEGLQHNCLDILAEAHGTRPDLTDQPLPDADHTWYTDGSSLLQEGQRKAGAAVTTETEVIWAKALPAGTSAQRAELIALTQALKMAEGKKLNVYTDSRYAFATAHIHGEIYRRRGWLTSEGKEIKNKDEILALLKALFLPKRLSIIHCPGHQKGHSAEARGNRMADQAARKAAITETPDTSTLLAGKRTADGSEFEKRTADGSEFESPKKKAKVE

SEQ ID NO: 2786 - protein, 2096 aa, synthetic construct
  source 1..2096: note = Description of Artificial Sequence: Synthetic polypeptide
MPAAKRVKLDGGDKKYSIGLDIGTNSVGWAVITDEYKVPSKKFKVLGNTDRHSIKKNLIGALLFDSGETAEATRLKRTARRRYTRRKNRICYLQEIFSNEMAKVDDSFFHRLEESFLVEEDKKHERHPIFGNIVDEVAYHEKYPTIYHLRKKLVDSTDKADLRLIYLALAHMIKFRGHFLIEGDLNPDNSDVDKLFIQLVQTYNQLFEENPINASGVDAKAILSARLSKSRRLENLIAQLPGEKKNGLFGNLIALSLGLTPNFKSNFDLAEDAKLQLSKDTYDDDLDNLLAQIGDQYADLFLAAKNLSDAILLSDILRVNTEITKAPLSASMIKRYDEHHQDLTLLKALVRQQLPEKYKEIFFDQSKNGYAGYIDGGASQEEFYKFIKPILEKMDGTEELLVKLNREDLLRKQRTFDNGSIPHQIHLGELHAILRRQEDFYPFLKDNREKIEKILTFRIPYYVGPLARGNSRFAWMTRKSEETITPWNFEEVVDKGASAQSFIERMTNFDKNLPNEKVLPKHSLLYEYFTVYNELTKVKYVTEGMRKPAFLSGEQKKAIVDLLFKTNRKVTVKQLKEDYFKKIECFDSVEISGVEDRFNASLGTYHDLLKIIKDKDFLDNEENEDILEDIVLTLTLFEDREMIEERLKTYAHLFDDKVMKQLKRRRYTGWGRLSRKLINGIRDKQSGKTILDFLKSDGFANRNFMQLIHDDSLTFKEDIQKAQVSGQGDSLHEHIANLAGSPAIKKGILQTVKVVDELVKVMGRHKPENIVIEMARENQTTQKGQKNSRERMKRIEEGIKELGSQILKEHPVENTQLQNEKLYLYYLQNGRDMYVDQELDINRLSDYDVDHIVPQSFLKDDSIDNKVLTRSDKARGKSDNVPSEEVVKKMKNYWRQLLNAKLITQRKFDNLTKAERGGLSELDKAGFIKRQLVETRQITKHVAQILDSRMNTKYDENDKLIREVKVITLKSKLVSDFRKDFQFYKVREINNYHHAHDAYLNAVVGTALIKKYPKLESEFVYGDYKVYDVRKMIAKSEQEIGKATAKYFFYSNIMNFFKTEITLANGEIRKRPLIETNGETGEIVWDKGRDFATVRKVLSMPQVNIVKKTEVQTGGFSKESILPKRNSDKLIARKKDWDPKKYGGFDSPTVAYSVLVVAKVEKGKSKKLKSVKELLGITIMERSSFEKNPIDFLEAKGYKEVKKDLIIKLPKYSLFELENGRKRMLASAGELQKGNELALPSKYVNFLYLASHYEKLKGSPEDNEQKQLFVEQHKHYLDEIIEQISEFSKRVILADANLDKVLSAYNKHRDKPIREQAENIIHLFTLTNLGAPAAFKYFDTTIDRKRYTSTKEVLDATLIHQSITGLYETRIDLSQLGGDGGPAPGGSEAAAKGGTLNIEDEHRLHETSKEPDVSLGSTWLSDFPQAWAETGGMGLAVRQAPLIIPLKATSTPVSIKQYPMSQEARLGIKPHIQRLLDQGILVPCQSPWNTPLLPVKKPGTNDYRPVQDLREVNKRVEDIHPTVPNPYNLLSGLPPSHQWYTVLDLKDAFFCLRLHPTSQPLFAFEWRDPEMGISGQLTWTRLPQGFKNSPTLFNEALHRDLADFRIQHPDLILLQYVDDLLLAATSELDCQQGTRALLQTLGNLGYRASAKKAQICQKQVKYLGYLLKEGQRWLTEARKETVMGQPTPKTPRQLREFLGKAGFCRLFIPGFAEMAAPLYPLTKPGTLFNWGPDQQKAYQEIKQALLTAPALGLPDLTKPFELFVDEKQGYAKGVLTQKLGPWRRPVAYLSKKLDPVAAGWPPCLRMVAAIAVLTKDAGKLTMGQPLVILAPHAVEALVKQPPDRWLSNARMTHYQALLLDTDRVQFGPVVALNPATLLPLPEEGLQHNCLDILAEAHGTRPDLTDQPLPDADHTWYTDGSSLLQEGQRKAGAAVTTETEVIWAKALPAGTSAQRAELIALTQALKMAEGKKLNVYTDSRYAFATAHIHGEIYRRRGWLTSEGKEIKNKDEILALLKALFLPKRLSIIHCPGHQKGHSAEARGNRMADQAARKAAITETPDTSTLLAGKRTADGSEFEKRTADGSEFESPKKKAKVE

SEQ ID NO: 2787 - protein, 2096 aa, synthetic construct
  source 1..2096: note = Description of Artificial Sequence: Synthetic polypeptide
MPAAKRVKLDGGDKKYSIGLDIGTNSVGWAVITDEYKVPSKKFKVLGNTDRHSIKKNLIGALLFDSGETAEATRLKRTARRRYTRRKNRICYLQEIFSNEMAKVDDSFFHRLEESFLVEEDKKHERHPIFGNIVDEVAYHEKYPTIYHLRKKLVDSTDKADLRLIYLALAHMIKFRGHFLIEGDLNPDNSDVDKLFIQLVQTYNQLFEENPINASGVDAKAILSARLSKSRRLENLIAQLPGEKKNGLFGNLIALSLGLTPNFKSNFDLAEDAKLQLSKDTYDDDLDNLLAQIGDQYADLFLAAKNLSDAILLSDILRVNTEITKAPLSASMIKRYDEHHQDLTLLKALVRQQLPEKYKEIFFDQSKNGYAGYIDGGASQEEFYKFIKPILEKMDGTEELLVKLNREDLLRKQRTFDNGSIPHQIHLGELHAILRRQEDFYPFLKDNREKIEKILTFRIPYYVGPLARGNSRFAWMTRKSEETITPWNFEEVVDKGASAQSFIERMTNFDKNLPNEKVLPKHSLLYEYFTVYNELTKVKYVTEGMRKPAFLSGEQKKAIVDLLFKTNRKVTVKQLKEDYFKKIECFDSVEISGVEDRFNASLGTYHDLLKIIKDKDFLDNEENEDILEDIVLTLTLFEDREMIEERLKTYAHLFDDKVMKQLKRRRYTGWGRLSRKLINGIRDKQSGKTILDFLKSDGFANRNFMQLIHDDSLTFKEDIQKAQVSGQGDSLHEHIANLAGSPAIKKGILQTVKVVDELVKVMGRHKPENIVIEMARENQTTQKGQKNSRERMKRIEEGIKELGSQILKEHPVENTQLQNEKLYLYYLQNGRDMYVDQELDINRLSDYDVDHIVPQSFLKDDSIDNKVLTRSDKARGKSDNVPSEEVVKKMKNYWRQLLNAKLITQRKFDNLTKAERGGLSELDKAGFIKRQLVETRQITKHVAQILDSRMNTKYDENDKLIREVKVITLKSKLVSDFRKDFQFYKVREINNYHHAHDAYLNAVVGTALIKKYPKLESEFVYGDYKVYDVRKMIAKSEQEIGKATAKYFFYSNIMNFFKTEITLANGEIRKRPLIETNGETGEIVWDKGRDFATVRKVLSMPQVNIVKKTEVQTGGFSKESILPKRNSDKLIARKKDWDPKKYGGFDSPTVAYSVLVVAKVEKGKSKKLKSVKELLGITIMERSSFEKNPIDFLEAKGYKEVKKDLIIKLPKYSLFELENGRKRMLASAGELQKGNELALPSKYVNFLYLASHYEKLKGSPEDNEQKQLFVEQHKHYLDEIIEQISEFSKRVILADANLDKVLSAYNKHRDKPIREQAENIIHLFTLTNLGAPAAFKYFDTTIDRKRYTSTKEVLDATLIHQSITGLYETRIDLSQLGGDGGGGSEAAAKGGGGGTLNIEDEHRLHETSKEPDVSLGSTWLSDFPQAWAETGGMGLAVRQAPLIIPLKATSTPVSIKQYPMSQEARLGIKPHIQRLLDQGILVPCQSPWNTPLLPVKKPGTNDYRPVQDLREVNKRVEDIHPTVPNPYNLLSGLPPSHQWYTVLDLKDAFFCLRLHPTSQPLFAFEWRDPEMGISGQLTWTRLPQGFKNSPTLFNEALHRDLADFRIQHPDLILLQYVDDLLLAATSELDCQQGTRALLQTLGNLGYRASAKKAQICQKQVKYLGYLLKEGQRWLTEARKETVMGQPTPKTPRQLREFLGKAGFCRLFIPGFAEMAAPLYPLTKPGTLFNWGPDQQKAYQEIKQALLTAPALGLPDLTKPFELFVDEKQGYAKGVLTQKLGPWRRPVAYLSKKLDPVAAGWPPCLRMVAAIAVLTKDAGKLTMGQPLVILAPHAVEALVKQPPDRWLSNARMTHYQALLLDTDRVQFGPVVALNPATLLPLPEEGLQHNCLDILAEAHGTRPDLTDQPLPDADHTWYTDGSSLLQEGQRKAGAAVTTETEVIWAKALPAGTSAQRAELIALTQALKMAEGKKLNVYTDSRYAFATAHIHGEIYRRRGWLTSEGKEIKNKDEILALLKALFLPKRLSIIHCPGHQKGHSAEARGNRMADQAARKAAITETPDTSTLLAGKRTADGSEFEKRTADGSEFESPKKKAKVE

SEQ ID NO: 2788 - protein, 2100 aa, synthetic construct
  source 1..2100: note = Description of Artificial Sequence: Synthetic polypeptide
MPAAKRVKLDGGDKKYSIGLDIGTNSVGWAVITDEYKVPSKKFKVLGNTDRHSIKKNLIGALLFDSGETAEATRLKRTARRRYTRRKNRICYLQEIFSNEMAKVDDSFFHRLEESFLVEEDKKHERHPIFGNIVDEVAYHEKYPTIYHLRKKLVDSTDKADLRLIYLALAHMIKFRGHFLIEGDLNPDNSDVDKLFIQLVQTYNQLFEENPINASGVDAKAILSARLSKSRRLENLIAQLPGEKKNGLFGNLIALSLGLTPNFKSNFDLAEDAKLQLSKDTYDDDLDNLLAQIGDQYADLFLAAKNLSDAILLSDILRVNTEITKAPLSASMIKRYDEHHQDLTLLKALVRQQLPEKYKEIFFDQSKNGYAGYIDGGASQEEFYKFIKPILEKMDGTEELLVKLNREDLLRKQRTFDNGSIPHQIHLGELHAILRRQEDFYPFLKDNREKIEKILTFRIPYYVGPLARGNSRFAWMTRKSEETITPWNFEEVVDKGASAQSFIERMTNFDKNLPNEKVLPKHSLLYEYFTVYNELTKVKYVTEGMRKPAFLSGEQKKAIVDLLFKTNRKVTVKQLKEDYFKKIECFDSVEISGVEDRFNASLGTYHDLLKIIKDKDFLDNEENEDILEDIVLTLTLFEDREMIEERLKTYAHLFDDKVMKQLKRRRYTGWGRLSRKLINGIRDKQSGKTILDFLKSDGFANRNFMQLIHDDSLTFKEDIQKAQVSGQGDSLHEHIANLAGSPAIKKGILQTVKVVDELVKVMGRHKPENIVIEMARENQTTQKGQKNSRERMKRIEEGIKELGSQILKEHPVENTQLQNEKLYLYYLQNGRDMYVDQELDINRLSDYDVDHIVPQSFLKDDSIDNKVLTRSDKARGKSDNVPSEEVVKKMKNYWRQLLNAKLITQRKFDNLTKAERGGLSELDKAGFIKRQLVETRQITKHVAQILDSRMNTKYDENDKLIREVKVITLKSKLVSDFRKDFQFYKVREINNYHHAHDAYLNAVVGTALIKKYPKLESEFVYGDYKVYDVRKMIAKSEQEIGKATAKYFFYSNIMNFFKTEITLANGEIRKRPLIETNGETGEIVWDKGRDFATVRKVLSMPQVNIVKKTEVQTGGFSKESILPKRNSDKLIARKKDWDPKKYGGFDSPTVAYSVLVVAKVEKGKSKKLKSVKELLGITIMERSSFEKNPIDFLEAKGYKEVKKDLIIKLPKYSLFELENGRKRMLASAGELQKGNELALPSKYVNFLYLASHYEKLKGSPEDNEQKQLFVEQHKHYLDEIIEQISEFSKRVILADANLDKVLSAYNKHRDKPIREQAENIIHLFTLTNLGAPAAFKYFDTTIDRKRYTSTKEVLDATLIHQSITGLYETRIDLSQLGGDGGEAAAKGGGGSEAAAKGGTLNIEDEHRLHETSKEPDVSLGSTWLSDFPQAWAETGGMGLAVRQAPLIIPLKATSTPVSIKQYPMSQEARLGIKPHIQRLLDQGILVPCQSPWNTPLLPVKKPGTNDYRPVQDLREVNKRVEDIHPTVPNPYNLLSGLPPSHQWYTVLDLKDAFFCLRLHPTSQPLFAFEWRDPEMGISGQLTWTRLPQGFKNSPTLFNEALHRDLADFRIQHPDLILLQYVDDLLLAATSELDCQQGTRALLQTLGNLGYRASAKKAQICQKQVKYLGYLLKEGQRWLTEARKETVMGQPTPKTPRQLREFLGKAGFCRLFIPGFAEMAAPLYPLTKPGTLFNWGPDQQKAYQEIKQALLTAPALGLPDLTKPFELFVDEKQGYAKGVLTQKLGPWRRPVAYLSKKLDPVAAGWPPCLRMVAAIAVLTKDAGKLTMGQPLVILAPHAVEALVKQPPDRWLSNARMTHYQALLLDTDRVQFGPVVALNPATLLPLPEEGLQHNCLDILAEAHGTRPDLTDQPLPDADHTWYTDGSSLLQEGQRKAGAAVTTETEVIWAKALPAGTSAQRAELIALTQALKMAEGKKLNVYTDSRYAFATAHIHGEIYRRRGWLTSEGKEIKNKDEILALLKALFLPKRLSIIHCPGHQKGHSAEARGNRMADQAARKAAITETPDTSTLLAGKRTADGSEFEKRTADGSEFESPKKKAKVE

SEQ ID NO: 2789 - protein, 2096 aa, synthetic construct
  source 1..2096: note = Description of Artificial Sequence: Synthetic polypeptide
MPAAKRVKLDGGDKKYSIGLDIGTNSVGWAVITDEYKVPSKKFKVLGNTDRHSIKKNLIGALLFDSGETAEATRLKRTARRRYTRRKNRICYLQEIFSNEMAKVDDSFFHRLEESFLVEEDKKHERHPIFGNIVDEVAYHEKYPTIYHLRKKLVDSTDKADLRLIYLALAHMIKFRGHFLIEGDLNPDNSDVDKLFIQLVQTYNQLFEENPINASGVDAKAILSARLSKSRRLENLIAQLPGEKKNGLFGNLIALSLGLTPNFKSNFDLAEDAKLQLSKDTYDDDLDNLLAQIGDQYADLFLAAKNLSDAILLSDILRVNTEITKAPLSASMIKRYDEHHQDLTLLKALVRQQLPEKYKEIFFDQSKNGYAGYIDGGASQEEFYKFIKPILEKMDGTEELLVKLNREDLLRKQRTFDNGSIPHQIHLGELHAILRRQEDFYPFLKDNREKIEKILTFRIPYYVGPLARGNSRFAWMTRKSEETITPWNFEEVVDKGASAQSFIERMTNFDKNLPNEKVLPKHSLLYEYFTVYNELTKVKYVTEGMRKPAFLSGEQKKAIVDLLFKTNRKVTVKQLKEDYFKKIECFDSVEISGVEDRFNASLGTYHDLLKIIKDKDFLDNEENEDILEDIVLTLTLFEDREMIEERLKTYAHLFDDKVMKQLKRRRYTGWGRLSRKLINGIRDKQSGKTILDFLKSDGFANRNFMQLIHDDSLTFKEDIQKAQVSGQGDSLHEHIANLAGSPAIKKGILQTVKVVDELVKVMGRHKPENIVIEMARENQTTQKGQKNSRERMKRIEEGIKELGSQILKEHPVENTQLQNEKLYLYYLQNGRDMYVDQELDINRLSDYDVDHIVPQSFLKDDSIDNKVLTRSDKARGKSDNVPSEEVVKKMKNYWRQLLNAKLITQRKFDNLTKAERGGLSELDKAGFIKRQLVETRQITKHVAQILDSRMNTKYDENDKLIREVKVITLKSKLVSDFRKDFQFYKVREINNYHHAHDAYLNAVVGTALIKKYPKLESEFVYGDYKVYDVRKMIAKSEQEIGKATAKYFFYSNIMNFFKTEITLANGEIRKRPLIETNGETGEIVWDKGRDFATVRKVLSMPQVNIVKKTEVQTGGFSKESILPKRNSDKLIARKKDWDPKKYGGFDSPTVAYSVLVVAKVEKGKSKKLKSVKELLGITIMERSSFEKNPIDFLEAKGYKEVKKDLIIKLPKYSLFELENGRKRMLASAGELQKGNELALPSKYVNFLYLASHYEKLKGSPEDNEQKQLFVEQHKHYLDEIIEQISEFSKRVILADANLDKVLSAYNKHRDKPIREQAENIIHLFTLTNLGAPAAFKYFDTTIDRKRYTSTKEVLDATLIHQSITGLYETRIDLSQLGGDGGEAAAKGGGGSSGGTLNIEDEHRLHETSKEPDVSLGSTWLSDFPQAWAETGGMGLAVRQAPLIIPLKATSTPVSIKQYPMSQEARLGIKPHIQRLLDQGILVPCQSPWNTPLLPVKKPGTNDYRPVQDLREVNKRVEDIHPTVPNPYNLLSGLPPSHQWYTVLDLKDAFFCLRLHPTSQPLFAFEWRDPEMGISGQLTWTRLPQGFKNSPTLFNEALHRDLADFRIQHPDLILLQYVDDLLLAATSELDCQQGTRALLQTLGNLGYRASAKKAQICQKQVKYLGYLLKEGQRWLTEARKETVMGQPTPKTPRQLREFLGKAGFCRLFIPGFAEMAAPLYPLTKPGTLFNWGPDQQKAYQEIKQALLTAPALGLPDLTKPFELFVDEKQGYAKGVLTQKLGPWRRPVAYLSKKLDPVAAGWPPCLRMVAAIAVLTKDAGKLTMGQPLVILAPHAVEALVKQPPDRWLSNARMTHYQALLLDTDRVQFGPVVALNPATLLPLPEEGLQHNCLDILAEAHGTRPDLTDQPLPDADHTWYTDGSSLLQEGQRKAGAAVTTETEVIWAKALPAGTSAQRAELIALTQALKMAEGKKLNVYTDSRYAFATAHIHGEIYRRRGWLTSEGKEIKNKDEILALLKALFLPKRLSIIHCPGHQKGHSAEARGNRMADQAARKAAITETPDTSTLLAGKRTADGSEFEKRTADGSEFESPKKKAKVE

SEQ ID NO: 2790 - protein, 2092 aa, synthetic construct
  source 1..2092: note = Description of Artificial Sequence: Synthetic polypeptide
MPAAKRVKLDGGDKKYSIGLDIGTNSVGWAVITDEYKVPSKKFKVLGNTDRHSIKKNLIGALLFDSGETAEATRLKRTARRRYTRRKNRICYLQEIFSNEMAKVDDSFFHRLEESFLVEEDKKHERHPIFGNIVDEVAYHEKYPTIYHLRKKLVDSTDKADLRLIYLALAHMIKFRGHFLIEGDLNPDNSDVDKLFIQLVQTYNQLFEENPINASGVDAKAILSARLSKSRRLENLIAQLPGEKKNGLFGNLIALSLGLTPNFKSNFDLAEDAKLQLSKDTYDDDLDNLLAQIGDQYADLFLAAKNLSDAILLSDILRVNTEITKAPLSASMIKRYDEHHQDLTLLKALVRQQLPEKYKEIFFDQSKNGYAGYIDGGASQEEFYKFIKPILEKMDGTEELLVKLNREDLLRKQRTFDNGSIPHQIHLGELHAILRRQEDFYPFLKDNREKIEKILTFRIPYYVGPLARGNSRFAWMTRKSEETITPWNFEEVVDKGASAQSFIERMTNFDKNLPNEKVLPKHSLLYEYFTVYNELTKVKYVTEGMRKPAFLSGEQKKAIVDLLFKTNRKVTVKQLKEDYFKKIECFDSVEISGVEDRFNASLGTYHDLLKIIKDKDFLDNEENEDILEDIVLTLTLFEDREMIEERLKTYAHLFDDKVMKQLKRRRYTGWGRLSRKLINGIRDKQSGKTILDFLKSDGFANRNFMQLIHDDSLTFKEDIQKAQVSGQGDSLHEHIANLAGSPAIKKGILQTVKVVDELVKVMGRHKPENIVIEMARENQTTQKGQKNSRERMKRIEEGIKELGSQILKEHPVENTQLQNEKLYLYYLQNGRDMYVDQELDINRLSDYDVDHIVPQSFLKDDSIDNKVLTRSDKARGKSDNVPSEEVVKKMKNYWRQLLNAKLITQRKFDNLTKAERGGLSELDKAGFIKRQLVETRQITKHVAQILDSRMNTKYDENDKLIREVKVITLKSKLVSDFRKDFQFYKVREINNYHHAHDAYLNAVVGTALIKKYPKLESEFVYGDYKVYDVRKMIAKSEQEIGKATAKYFFYSNIMNFFKTEITLANGEIRKRPLIETNGETGEIVWDKGRDFATVRKVLSMPQVNIVKKTEVQTGGFSKESILPKRNSDKLIARKKDWDPKKYGGFDSPTVAYSVLVVAKVEKGKSKKLKSVKELLGITIMERSSFEKNPIDFLEAKGYKEVKKDLIIKLPKYSLFELENGRKRMLASAGELQKGNELALPSKYVNFLYLASHYEKLKGSPEDNEQKQLFVEQHKHYLDEIIEQISEFSKRVILADANLDKVLSAYNKHRDKPIREQAENIIHLFTLTNLGAPAAFKYFDTTIDRKRYTSTKEVLDATLIHQSITGLYETRIDLSQLGGDGGGGGGGGGGGTLNIEDEHRLHETSKEPDVSLGSTWLSDFPQAWAETGGMGLAVRQAPLIIPLKATSTPVSIKQYPMSQEARLGIKPHIQRLLDQGILVPCQSPWNTPLLPVKKPGTNDYRPVQDLREVNKRVEDIHPTVPNPYNLLSGLPPSHQWYTVLDLKDAFFCLRLHPTSQPLFAFEWRDPEMGISGQLTWTRLPQGFKNSPTLFNEALHRDLADFRIQHPDLILLQYVDDLLLAATSELDCQQGTRALLQTLGNLGYRASAKKAQICQKQVKYLGYLLKEGQRWLTEARKETVMGQPTPKTPRQLREFLGKAGFCRLFIPGFAEMAAPLYPLTKPGTLFNWGPDQQKAYQEIKQALLTAPALGLPDLTKPFELFVDEKQGYAKGVLTQKLGPWRRPVAYLSKKLDPVAAGWPPCLRMVAAIAVLTKDAGKLTMGQPLVILAPHAVEALVKQPPDRWLSNARMTHYQALLLDTDRVQFGPVVALNPATLLPLPEEGLQHNCLDILAEAHGTRPDLTDQPLPDADHTWYTDGSSLLQEGQRKAGAAVTTETEVIWAKALPAGTSAQRAELIALTQALKMAEGKKLNVYTDSRYAFATAHIHGEIYRRRGWLTSEGKEIKNKDEILALLKALFLPKRLSIIHCPGHQKGHSAEARGNRMADQAARKAAITETPDTSTLLAGKRTADGSEFEKRTADGSEFESPKKKAKVE

SEQ ID NO: 2791 - protein, 2100 aa, synthetic construct
  source 1..2100: note = Description of Artificial Sequence: Synthetic polypeptide
MPAAKRVKLDGGDKKYSIGLDIGTNSVGWAVITDEYKVPSKKFKVLGNTDRHSIKKNLIGALLFDSGETAEATRLKRTARRRYTRRKNRICYLQEIFSNEMAKVDDSFFHRLEESFLVEEDKKHERHPIFGNIVDEVAYHEKYPTIYHLRKKLVDSTDKADLRLIYLALAHMIKFRGHFLIEGDLNPDNSDVDKLFIQLVQTYNQLFEENPINASGVDAKAILSARLSKSRRLENLIAQLPGEKKNGLFGNLIALSLGLTPNFKSNFDLAEDAKLQLSKDTYDDDLDNLLAQIGDQYADLFLAAKNLSDAILLSDILRVNTEITKAPLSASMIKRYDEHHQDLTLLKALVRQQLPEKYKEIFFDQSKNGYAGYIDGGASQEEFYKFIKPILEKMDGTEELLVKLNREDLLRKQRTFDNGSIPHQIHLGELHAILRRQEDFYPFLKDNREKIEKILTFRIPYYVGPLARGNSRFAWMTRKSEETITPWNFEEVVDKGASAQSFIERMTNFDKNLPNEKVLPKHSLLYEYFTVYNELTKVKYVTEGMRKPAFLSGEQKKAIVDLLFKTNRKVTVKQLKEDYFKKIECFDSVEISGVEDRFNASLGTYHDLLKIIKDKDFLDNEENEDILEDIVLTLTLFEDREMIEERLKTYAHLFDDKVMKQLKRRRYTGWGRLSRKLINGIRDKQSGKTILDFLKSDGFANRNFMQLIHDDSLTFKEDIQKAQVSGQGDSLHEHIANLAGSPAIKKGILQTVKVVDELVKVMGRHKPENIVIEMARENQTTQKGQKNSRERMKRIEEGIKELGSQILKEHPVENTQLQNEKLYLYYLQNGRDMYVDQELDINRLSDYDVDHIVPQSFLKDDSIDNKVLTRSDKARGKSDNVPSEEVVKKMKNYWRQLLNAKLITQRKFDNLTKAERGGLSELDKAGFIKRQLVETRQITKHVAQILDSRMNTKYDENDKLIREVKVITLKSKLVSDFRKDFQFYKVREINNYHHAHDAYLNAVVGTALIKKYPKLESEFVYGDYKVYDVRKMIAKSEQEIGKATAKYFFYSNIMNFFKTEITLANGEIRKRPLIETNGETGEIVWDKGRDFATVRKVLSMPQVNIVKKTEVQTGGFSKESILPKRNSDKLIARKKDWDPKKYGGFDSPTVAYSVLVVAKVEKGKSKKLKSVKELLGITIMERSSFEKNPIDFLEAKGYKEVKKDLIIKLPKYSLFELENGRKRMLASAGELQKGNELALPSKYVNFLYLASHYEKLKGSPEDNEQKQLFVEQHKHYLDEIIEQISEFSKRVILADANLDKVLSAYNKHRDKPIREQAENIIHLFTLTNLGAPAAFKYFDTTIDRKRYTSTKEVLDATLIHQSITGLYETRIDLSQLGGDGGEAAAKEAAAKEAAAKGGTLNIEDEHRLHETSKEPDVSLGSTWLSDFPQAWAETGGMGLAVRQAPLIIPLKATSTPVSIKQYPMSQEARLGIKPHIQRLLDQGILVPCQSPWNTPLLPVKKPGTNDYRPVQDLREVNKRVEDIHPTVPNPYNLLSGLPPSHQWYTVLDLKDAFFCLRLHPTSQPLFAFEWRDPEMGISGQLTWTRLPQGFKNSPTLFNEALHRDLADFRIQHPDLILLQYVDDLLLAATSELDCQQGTRALLQTLGNLGYRASAKKAQICQKQVKYLGYLLKEGQRWLTEARKETVMGQPTPKTPRQLREFLGKAGFCRLFIPGFAEMAAPLYPLTKPGTLFNWGPDQQKAYQEIKQALLTAPALGLPDLTKPFELFVDEKQGYAKGVLTQKLGPWRRPVAYLSKKLDPVAAGWPPCLRMVAAIAVLTKDAGKLTMGQPLVILAPHAVEALVKQPPDRWLSNARMTHYQALLLDTDRVQFGPVVALNPATLLPLPEEGLQHNCLDILAEAHGTRPDLTDQPLPDADHTWYTDGSSLLQEGQRKAGAAVTTETEVIWAKALPAGTSAQRAELIALTQALKMAEGKKLNVYTDSRYAFATAHIHGEIYRRRGWLTSEGKEIKNKDEILALLKALFLPKRLSIIHCPGHQKGHSAEARGNRMADQAARKAAITETPDTSTLLAGKRTADGSEFEKRTADGSEFESPKKKAKVE

SEQ ID NO: 2792 - protein, 2096 aa, synthetic construct
  source 1..2096: note = Description of Artificial Sequence: Synthetic polypeptide
MPAAKRVKLDGGDKKYSIGLDIGTNSVGWAVITDEYKVPSKKFKVLGNTDRHSIKKNLIGALLFDSGETAEATRLKRTARRRYTRRKNRICYLQEIFSNEMAKVDDSFFHRLEESFLVEEDKKHERHPIFGNIVDEVAYHEKYPTIYHLRKKLVDSTDKADLRLIYLALAHMIKFRGHFLIEGDLNPDNSDVDKLFIQLVQTYNQLFEENPINASGVDAKAILSARLSKSRRLENLIAQLPGEKKNGLFGNLIALSLGLTPNFKSNFDLAEDAKLQLSKDTYDDDLDNLLAQIGDQYADLFLAAKNLSDAILLSDILRVNTEITKAPLSASMIKRYDEHHQDLTLLKALVRQQLPEKYKEIFFDQSKNGYAGYIDGGASQEEFYKFIKPILEKMDGTEELLVKLNREDLLRKQRTFDNGSIPHQIHLGELHAILRRQEDFYPFLKDNREKIEKILTFRIPYYVGPLARGNSRFAWMTRKSEETITPWNFEEVVDKGASAQSFIERMTNFDKNLPNEKVLPKHSLLYEYFTVYNELTKVKYVTEGMRKPAFLSGEQKKAIVDLLFKTNRKVTVKQLKEDYFKKIECFDSVEISGVEDRFNASLGTYHDLLKIIKDKDFLDNEENEDILEDIVLTLTLFEDREMIEERLKTYAHLFDDKVMKQLKRRRYTGWGRLSRKLINGIRDKQSGKTILDFLKSDGFANRNFMQLIHDDSLTFKEDIQKAQVSGQGDSLHEHIANLAGSPAIKKGILQTVKVVDELVKVMGRHKPENIVIEMARENQTTQKGQKNSRERMKRIEEGIKELGSQILKEHPVENTQLQNEKLYLYYLQNGRDMYVDQELDINRLSDYDVDHIVPQSFLKDDSIDNKVLTRSDKARGKSDNVPSEEVVKKMKNYWRQLLNAKLITQRKFDNLTKAERGGLSELDKAGFIKRQLVETRQITKHVAQILDSRMNTKYDENDKLIREVKVITLKSKLVSDFRKDFQFYKVREINNYHHAHDAYLNAVVGTALIKKYPKLESEFVYGDYKVYDVRKMIAKSEQEIGKATAKYFFYSNIMNFFKTEITLANGEIRKRPLIETNGETGEIVWDKGRDFATVRKVLSMPQVNIVKKTEVQTGGFSKESILPKRNSDKLIARKKDWDPKKYGGFDSPTVAYSVLVVAKVEKGKSKKLKSVKELLGITIMERSSFEKNPIDFLEAKGYKEVKKDLIIKLPKYSLFELENGRKRMLASAGELQKGNELALPSKYVNFLYLASHYEKLKGSPEDNEQKQLFVEQHKHYLDEIIEQISEFSKRVILADANLDKVLSAYNKHRDKPIREQAENIIHLFTLTNLGAPAAFKYFDTTIDRKRYTSTKEVLDATLIHQSITGLYETRIDLSQLGGDGGEAAAKGSSPAPGGTLNIEDEHRLHETSKEPDVSLGSTWLSDFPQAWAETGGMGLAVRQAPLIIPLKATSTPVSIKQYPMSQEARLGIKPHIQRLLDQGILVPCQSPWNTPLLPVKKPGTNDYRPVQDLREVNKRVEDIHPTVPNPYNLLSGLPPSHQWYTVLDLKDAFFCLRLHPTSQPLFAFEWRDPEMGISGQLTWTRLPQGFKNSPTLFNEALHRDLADFRIQHPDLILLQYVDDLLLAATSELDCQQGTRALLQTLGNLGYRASAKKAQICQKQVKYLGYLLKEGQRWLTEARKETVMGQPTPKTPRQLREFLGKAGFCRLFIPGFAEMAAPLYPLTKPGTLFNWGPDQQKAYQEIKQALLTAPALGLPDLTKPFELFVDEKQGYAKGVLTQKLGPWRRPVAYLSKKLDPVAAGWPPCLRMVAAIAVLTKDAGKLTMGQPLVILAPHAVEALVKQPPDRWLSNARMTHYQALLLDTDRVQFGPVVALNPATLLPLPEEGLQHNCLDILAEAHGTRPDLTDQPLPDADHTWYTDGSSLLQEGQRKAGAAVTTETEVIWAKALPAGTSAQRAELIALTQALKMAEGKKLNVYTDSRYAFATAHIHGEIYRRRGWLTSEGKEIKNKDEILALLKALFLPKRLSIIHCPGHQKGHSAEARGNRMADQAARKAAITETPDTSTLLAGKRTADGSEFEKRTADGSEFESPKKKAKVE

SEQ ID NO: 2793 - protein, 2094 aa, synthetic construct
  source 1..2094: note = Description of Artificial Sequence: Synthetic polypeptide
MPAAKRVKLDGGDKKYSIGLDIGTNSVGWAVITDEYKVPSKKFKVLGNTDRHSIKKNLIGALLFDSGETAEATRLKRTARRRYTRRKNRICYLQEIFSNEMAKVDDSFFHRLEESFLVEEDKKHERHPIFGNIVDEVAYHEKYPTIYHLRKKLVDSTDKADLRLIYLALAHMIKFRGHFLIEGDLNPDNSDVDKLFIQLVQTYNQLFEENPINASGVDAKAILSARLSKSRRLENLIAQLPGEKKNGLFGNLIALSLGLTPNFKSNFDLAEDAKLQLSKDTYDDDLDNLLAQIGDQYADLFLAAKNLSDAILLSDILRVNTEITKAPLSASMIKRYDEHHQDLTLLKALVRQQLPEKYKEIFFDQSKNGYAGYIDGGASQEEFYKFIKPILEKMDGTEELLVKLNREDLLRKQRTFDNGSIPHQIHLGELHAILRRQEDFYPFLKDNREKIEKILTFRIPYYVGPLARGNSRFAWMTRKSEETITPWNFEEVVDKGASAQSFIERMTNFDKNLPNEKVLPKHSLLYEYFTVYNELTKVKYVTEGMRKPAFLSGEQKKAIVDLLFKTNRKVTVKQLKEDYFKKIECFDSVEISGVEDRFNASLGTYHDLLKIIKDKDFLDNEENEDILEDIVLTLTLFEDREMIEERLKTYAHLFDDKVMKQLKRRRYTGWGRLSRKLINGIRDKQSGKTILDFLKSDGFANRNFMQLIHDDSLTFKEDIQKAQVSGQGDSLHEHIANLAGSPAIKKGILQTVKVVDELVKVMGRHKPENIVIEMARENQTTQKGQKNSRERMKRIEEGIKELGSQILKEHPVENTQLQNEKLYLYYLQNGRDMYVDQELDINRLSDYDVDHIVPQSFLKDDSIDNKVLTRSDKARGKSDNVPSEEVVKKMKNYWRQLLNAKLITQRKFDNLTKAERGGLSELDKAGFIKRQLVETRQITKHVAQILDSRMNTKYDENDKLIREVKVITLKSKLVSDFRKDFQFYKVREINNYHHAHDAYLNAVVGTALIKKYPKLESEFVYGDYKVYDVRKMIAKSEQEIGKATAKYFFYSNIMNFFKTEITLANGEIRKRPLIETNGETGEIVWDKGRDFATVRKVLSMPQVNIVKKTEVQTGGFSKESILPKRNSDKLIARKKDWDPKKYGGFDSPTVAYSVLVVAKVEKGKSKKLKSVKELLGITIMERSSFEKNPIDFLEAKGYKEVKKDLIIKLPKYSLFELENGRKRMLASAGELQKGNELALPSKYVNFLYLASHYEKLKGSPEDNEQKQLFVEQHKHYLDEIIEQISEFSKRVILADANLDKVLSAYNKHRDKPIREQAENIIHLFTLTNLGAPAAFKYFDTTIDRKRYTSTKEVLDATLIHQSITGLYETRIDLSQLGGDGGPAPGGGGSSGGTLNIEDEHRLHETSKEPDVSLGSTWLSDFPQAWAETGGMGLAVRQAPLIIPLKATSTPVSIKQYPMSQEARLGIKPHIQRLLDQGILVPCQSPWNTPLLPVKKPGTNDYRPVQDLREVNKRVEDIHPTVPNPYNLLSGLPPSHQWYTVLDLKDAFFCLRLHPTSQPLFAFEWRDPEMGISGQLTWTRLPQGFKNSPTLFNEALHRDLADFRIQHPDLILLQYVDDLLLAATSELDCQQGTRALLQTLGNLGYRASAKKAQICQKQVKYLGYLLKEGQRWLTEARKETVMGQPTPKTPRQLREFLGKAGFCRLFIPGFAEMAAPLYPLTKPGTLFNWGPDQQKAYQEIKQALLTAPALGLPDLTKPFELFVDEKQGYAKGVLTQKLGPWRRPVAYLSKKLDPVAAGWPPCLRMVAAIAVLTKDAGKLTMGQPLVILAPHAVEALVKQPPDRWLSNARMTHYQALLLDTDRVQFGPVVALNPATLLPLPEEGLQHNCLDILAEAHGTRPDLTDQPLPDADHTWYTDGSSLLQEGQRKAGAAVTTETEVIWAKALPAGTSAQRAELIALTQALKMAEGKKLNVYTDSRYAFATAHIHGEIYRRRGWLTSEGKEIKNKDEILALLKALFLPKRLSIIHCPGHQKGHSAEARGNRMADQAARKAAITETPDTSTLLAGKRTADGSEFEKRTADGSEFESPKKKAKVE

SEQ ID NO: 2794 - protein, 2096 aa, synthetic construct
  source 1..2096: note = Description of Artificial Sequence: Synthetic polypeptide
MPAAKRVKLDGGDKKYSIGLDIGTNSVGWAVITDEYKVPSKKFKVLGNTDRHSIKKNLIGALLFDSGETAEATRLKRTARRRYTRRKNRICYLQEIFSNEMAKVDDSFFHRLEESFLVEEDKKHERHPIFGNIVDEVAYHEKYPTIYHLRKKLVDSTDKADLRLIYLALAHMIKFRGHFLIEGDLNPDNSDVDKLFIQLVQTYNQLFEENPINASGVDAKAILSARLSKSRRLENLIAQLPGEKKNGLFGNLIALSLGLTPNFKSNFDLAEDAKLQLSKDTYDDDLDNLLAQIGDQYADLFLAAKNLSDAILLSDILRVNTEITKAPLSASMIKRYDEHHQDLTLLKALVRQQLPEKYKEIFFDQSKNGYAGYIDGGASQEEFYKFIKPILEKMDGTEELLVKLNREDLLRKQRTFDNGSIPHQIHLGELHAILRRQEDFYPFLKDNREKIEKILTFRIPYYVGPLARGNSRFAWMTRKSEETITPWNFEEVVDKGASAQSFIERMTNFDKNLPNEKVLPKHSLLYEYFTVYNELTKVKYVTEGMRKPAFLSGEQKKAIVDLLFKTNRKVTVKQLKEDYFKKIECFDSVEISGVEDRFNASLGTYHDLLKIIKDKDFLDNEENEDILEDIVLTLTLFEDREMIEERLKTYAHLFDDKVMKQLKRRRYTGWGRLSRKLINGIRDKQSGKTILDFLKSDGFANRNFMQLIHDDSLTFKEDIQKAQVSGQGDSLHEHIANLAGSPAIKKGILQTVKVVDELVKVMGRHKPENIVIEMARENQTTQKGQKNSRERMKRIEEGIKELGSQILKEHPVENTQLQNEKLYLYYLQNGRDMYVDQELDINRLSDYDVDHIVPQSFLKDDSIDNKVLTRSDKARGKSDNVPSEEVVKKMKNYWRQLLNAKLITQRKFDNLTKAERGGLSELDKAGFIKRQLVETRQITKHVAQILDSRMNTKYDENDKLIREVKVITLKSKLVSDFRKDFQFYKVREINNYHHAHDAYLNAVVGTALIKKYPKLESEFVYGDYKVYDVRKMIAKSEQEIGKATAKYFFYSNIMNFFKTEITLANGEIRKRPLIETNGETGEIVWDKGRDFATVRKVLSMPQVNIVKKTEVQTGGFSKESILPKRNSDKLIARKKDWDPKKYGGFDSPTVAYSVLVVAKVEKGKSKKLKSVKELLGITIMERSSFEKNPIDFLEAKGYKEVKKDLIIKLPKYSLFELENGRKRMLASAGELQKGNELALPSKYVNFLYLASHYEKLKGSPEDNEQKQLFVEQHKHYLDEIIEQISEFSKRVILADANLDKVLSAYNKHRDKPIREQAENIIHLFTLTNLGAPAAFKYFDTTIDRKRYTSTKEVLDATLIHQSITGLYETRIDLSQLGGDGGEAAAKGGSGGGGGTLNIEDEHRLHETSKEPDVSLGSTWLSDFPQAWAETGGMGLAVRQAPLIIPLKATSTPVSIKQYPMSQEARLGIKPHIQRLLDQGILVPCQSPWNTPLLPVKKPGTNDYRPVQDLREVNKRVEDIHPTVPNPYNLLSGLPPSHQWYTVLDLKDAFFCLRLHPTSQPLFAFEWRDPEMGISGQLTWTRLPQGFKNSPTLFNEALHRDLADFRIQHPDLILLQYVDDLLLAATSELDCQQGTRALLQTLGNLGYRASAKKAQICQKQVKYLGYLLKEGQRWLTEARKETVMGQPTPKTPRQLREFLGKAGFCRLFIPGFAEMAAPLYPLTKPGTLFNWGPDQQKAYQEIKQALLTAPALGLPDLTKPFELFVDEKQGYAKGVLTQKLGPWRRPVAYLSKKLDPVAAGWPPCLRMVAAIAVLTKDAGKLTMGQPLVILAPHAVEALVKQPPDRWLSNARMTHYQALLLDTDRVQFGPVVALNPATLLPLPEEGLQHNCLDILAEAHGTRPDLTDQPLPDADHTWYTDGSSLLQEGQRKAGAAVTTETEVIWAKALPAGTSAQRAELIALTQALKMAEGKKLNVYTDSRYAFATAHIHGEIYRRRGWLTSEGKEIKNKDEILALLKALFLPKRLSIIHCPGHQKGHSAEARGNRMADQAARKAAITETPDTSTLLAGKRTADGSEFEKRTADGSEFESPKKKAKVE

SEQ ID NO: 2795 - protein, 2097 aa, synthetic construct
  source 1..2097: note = Description of Artificial Sequence: Synthetic polypeptide
MPAAKRVKLDGGDKKYSIGLDIGTNSVGWAVITDEYKVPSKKFKVLGNTDRHSIKKNLIGALLFDSGETAEATRLKRTARRRYTRRKNRICYLQEIFSNEMAKVDDSFFHRLEESFLVEEDKKHERHPIFGNIVDEVAYHEKYPTIYHLRKKLVDSTDKADLRLIYLALAHMIKFRGHFLIEGDLNPDNSDVDKLFIQLVQTYNQLFEENPINASGVDAKAILSARLSKSRRLENLIAQLPGEKKNGLFGNLIALSLGLTPNFKSNFDLAEDAKLQLSKDTYDDDLDNLLAQIGDQYADLFLAAKNLSDAILLSDILRVNTEITKAPLSASMIKRYDEHHQDLTLLKALVRQQLPEKYKEIFFDQSKNGYAGYIDGGASQEEFYKFIKPILEKMDGTEELLVKLNREDLLRKQRTFDNGSIPHQIHLGELHAILRRQEDFYPFLKDNREKIEKILTFRIPYYVGPLARGNSRFAWMTRKSEETITPWNFEEVVDKGASAQSFIERMTNFDKNLPNEKVLPKHSLLYEYFTVYNELTKVKYVTEGMRKPAFLSGEQKKAIVDLLFKTNRKVTVKQLKEDYFKKIECFDSVEISGVEDRFNASLGTYHDLLKIIKDKDFLDNEENEDILEDIVLTLTLFEDREMIEERLKTYAHLFDDKVMKQLKRRRYTGWGRLSRKLINGIRDKQSGKTILDFLKSDGFANRNFMQLIHDDSLTFKEDIQKAQVSGQGDSLHEHIANLAGSPAIKKGILQTVKVVDELVKVMGRHKPENIVIEMARENQTTQKGQKNSRERMKRIEEGIKELGSQILKEHPVENTQLQNEKLYLYYLQNGRDMYVDQELDINRLSDYDVDHIVPQSFLKDDSIDNKVLTRSDKARGKSDNVPSEEVVKKMKNYWRQLLNAKLITQRKFDNLTKAERGGLSELDKAGFIKRQLVETRQITKHVAQILDSRMNTKYDENDKLIREVKVITLKSKLVSDFRKDFQFYKVREINNYHHAHDAYLNAVVGTALIKKYPKLESEFVYGDYKVYDVRKMIAKSEQEIGKATAKYFFYSNIMNFFKTEITLANGEIRKRPLIETNGETGEIVWDKGRDFATVRKVLSMPQVNIVKKTEVQTGGFSKESILPKRNSDKLIARKKDWDPKKYGGFDSPTVAYSVLVVAKVEKGKSKKLKSVKELLGITIMERSSFEKNPIDFLEAKGYKEVKKDLIIKLPKYSLFELENGRKRMLASAGELQKGNELALPSKYVNFLYLASHYEKLKGSPEDNEQKQLFVEQHKHYLDEIIEQISEFSKRVILADANLDKVLSAYNKHRDKPIREQAENIIHLFTLTNLGAPAAFKYFDTTIDRKRYTSTKEVLDATLIHQSITGLYETRIDLSQLGGDGGGGSGGSGGSGGSGGTLNIEDEHRLHETSKEPDVSLGSTWLSDFPQAWAETGGMGLAVRQAPLIIPLKATSTPVSIKQYPMSQEARLGIKPHIQRLLDQGILVPCQSPWNTPLLPVKKPGTNDYRPVQDLREVNKRVEDIHPTVPNPYNLLSGLPPSHQWYTVLDLKDAFFCLRLHPTSQPLFAFEWRDPEMGISGQLTWTRLPQGFKNSPTLFNEALHRDLADFRIQHPDLILLQYVDDLLLAATSELDCQQGTRALLQTLGNLGYRASAKKAQICQKQVKYLGYLLKEGQRWLTEARKETVMGQPTPKTPRQLREFLGKAGFCRLFIPGFAEMAAPLYPLTKPGTLFNWGPDQQKAYQEIKQALLTAPALGLPDLTKPFELFVDEKQGYAKGVLTQKLGPWRRPVAYLSKKLDPVAAGWPPCLRMVAAIAVLTKDAGKLTMGQPLVILAPHAVEALVKQPPDRWLSNARMTHYQALLLDTDRVQFGPVVALNPATLLPLPEEGLQHNCLDILAEAHGTRPDLTDQPLPDADHTWYTDGSSLLQEGQRKAGAAVTTETEVIWAKALPAGTSAQRAELIALTQALKMAEGKKLNVYTDSRYAFATAHIHGEIYRRRGWLTSEGKEIKNKDEILALLKALFLPKRLSIIHCPGHQKGHSAEARGNRMADQAARKAAITETPDTSTLLAGKRTADGSEFEKRTADGSEFESPKKKAKVE

SEQ ID NO: 2796 - protein, 2093 aa, synthetic construct
  source 1..2093: note = Description of Artificial Sequence: Synthetic polypeptide
MPAAKRVKLDGGDKKYSIGLDIGTNSVGWAVITDEYKVPSKKFKVLGNTDRHSIKKNLIGALLFDSGETAEATRLKRTARRRYTRRKNRICYLQEIFSNEMAKVDDSFFHRLEESFLVEEDKKHERHPIFGNIVDEVAYHEKYPTIYHLRKKLVDSTDKADLRLIYLALAHMIKFRGHFLIEGDLNPDNSDVDKLFIQLVQTYNQLFEENPINASGVDAKAILSARLSKSRRLENLIAQLPGEKKNGLFGNLIALSLGLTPNFKSNFDLAEDAKLQLSKDTYDDDLDNLLAQIGDQYADLFLAAKNLSDAILLSDILRVNTEITKAPLSASMIKRYDEHHQDLTLLKALVRQQLPEKYKEIFFDQSKNGYAGYIDGGASQEEFYKFIKPILEKMDGTEELLVKLNREDLLRKQRTFDNGSIPHQIHLGELHAILRRQEDFYPFLKDNREKIEKILTFRIPYYVGPLARGNSRFAWMTRKSEETITPWNFEEVVDKGASAQSFIERMTNFDKNLPNEKVLPKHSLLYEYFTVYNELTKVKYVTEGMRKPAFLSGEQKKAIVDLLFKTNRKVTVKQLKEDYFKKIECFDSVEISGVEDRFNASLGTYHDLLKIIKDKDFLDNEENEDILEDIVLTLTLFEDREMIEERLKTYAHLFDDKVMKQLKRRRYTGWGRLSRKLINGIRDKQSGKTILDFLKSDGFANRNFMQLIHDDSLTFKEDIQKAQVSGQGDSLHEHIANLAGSPAIKKGILQTVKVVDELVKVMGRHKPENIVIEMARENQTTQKGQKNSRERMKRIEEGIKELGSQILKEHPVENTQLQNEKLYLYYLQNGRDMYVDQELDINRLSDYDVDHIVPQSFLKDDSIDNKVLTRSDKARGKSDNVPSEEVVKKMKNYWRQLLNAKLITQRKFDNLTKAERGGLSELDKAGFIKRQLVETRQITKHVAQILDSRMNTKYDENDKLIREVKVITLKSKLVSDFRKDFQFYKVREINNYHHAHDAYLNAVVGTALIKKYPKLESEFVYGDYKVYDVRKMIAKSEQEIGKATAKYFFYSNIMNFFKTEITLANGEIRKRPLIETNGETGEIVWDKGRDFATVRKVLSMPQVNIVKKTEVQTGGFSKESILPKRNSDKLIARKKDWDPKKYGGFDSPTVAYSVLVVAKVEKGKSKKLKSVKELLGITIMERSSFEKNPIDFLEAKGYKEVKKDLIIKLPKYSLFELENGRKRMLASAGELQKGNELALPSKYVNFLYLASHYEKLKGSPEDNEQKQLFVEQHKHYLDEIIEQISEFSKRVILADANLDKVLSAYNKHRDKPIREQAENIIHLFTLTNLGAPAAFKYFDTTIDRKRYTSTKEVLDATLIHQSITGLYETRIDLSQLGGDGGEAAAKGGGGGTLNIEDEHRLHETSKEPDVSLGSTWLSDFPQAWAETGGMGLAVRQAPLIIPLKATSTPVSIKQYPMSQEARLGIKPHIQRLLDQGILVPCQSPWNTPLLPVKKPGTNDYRPVQDLREVNKRVEDIHPTVPNPYNLLSGLPPSHQWYTVLDLKDAFFCLRLHPTSQPLFAFEWRDPEMGISGQLTWTRLPQGFKNSPTLFNEALHRDLADFRIQHPDLILLQYVDDLLLAATSELDCQQGTRALLQTLGNLGYRASAKKAQICQKQVKYLGYLLKEGQRWLTEARKETVMGQPTPKTPRQLREFLGKAGFCRLFIPGFAEMAAPLYPLTKPGTLFNWGPDQQKAYQEIKQALLTAPALGLPDLTKPFELFVDEKQGYAKGVLTQKLGPWRRPVAYLSKKLDPVAAGWPPCLRMVAAIAVLTKDAGKLTMGQPLVILAPHAVEALVKQPPDRWLSNARMTHYQALLLDTDRVQFGPVVALNPATLLPLPEEGLQHNCLDILAEAHGTRPDLTDQPLPDADHTWYTDGSSLLQEGQRKAGAAVTTETEVIWAKALPAGTSAQRAELIALTQALKMAEGKKLNVYTDSRYAFATAHIHGEIYRRRGWLTSEGKEIKNKDEILALLKALFLPKRLSIIHCPGHQKGHSAEARGNRMADQAARKAAITETPDTSTLLAGKRTADGSEFEKRTADGSEFESPKKKAKVE

SEQ ID NO: 2797 - protein, 2098 aa, synthetic construct
  source 1..2098: note = Description of Artificial Sequence: Synthetic polypeptide
MPAAKRVKLDGGDKKYSIGLDIGTNSVGWAVITDEYKVPSKKFKVLGNTDRHSIKKNLIGALLFDSGETAEATRLKRTARRRYTRRKNRICYLQEIFSNEMAKVDDSFFHRLEESFLVEEDKKHERHPIFGNIVDEVAYHEKYPTIYHLRKKLVDSTDKADLRLIYLALAHMIKFRGHFLIEGDLNPDNSDVDKLFIQLVQTYNQLFEENPINASGVDAKAILSARLSKSRRLENLIAQLPGEKKNGLFGNLIALSLGLTPNFKSNFDLAEDAKLQLSKDTYDDDLDNLLAQIGDQYADLFLAAKNLSDAILLSDILRVNTEITKAPLSASMIKRYDEHHQDLTLLKALVRQQLPEKYKEIFFDQSKNGYAGYIDGGASQEEFYKFIKPILEKMDGTEELLVKLNREDLLRKQRTFDNGSIPHQIHLGELHAILRRQEDFYPFLKDNREKIEKILTFRIPYYVGPLARGNSRFAWMTRKSEETITPWNFEEVVDKGASAQSFIERMTNFDKNLPNEKVLPKHSLLYEYFTVYNELTKVKYVTEGMRKPAFLSGEQKKAIVDLLFKTNRKVTVKQLKEDYFKKIECFDSVEISGVEDRFNASLGTYHDLLKIIKDKDFLDNEENEDILEDIVLTLTLFEDREMIEERLKTYAHLFDDKVMKQLKRRRYTGWGRLSRKLINGIRDKQSGKTILDFLKSDGFANRNFMQLIHDDSLTFKEDIQKAQVSGQGDSLHEHIANLAGSPAIKKGILQTVKVVDELVKVMGRHKPENIVIEMARENQTTQKGQKNSRERMKRIEEGIKELGSQILKEHPVENTQLQNEKLYLYYLQNGRDMYVDQELDINRLSDYDVDHIVPQSFLKDDSIDNKVLTRSDKARGKSDNVPSEEVVKKMKNYWRQLLNAKLITQRKFDNLTKAERGGLSELDKAGFIKRQLVETRQITKHVAQILDSRMNTKYDENDKLIREVKVITLKSKLVSDFRKDFQFYKVREINNYHHAHDAYLNAVVGTALIKKYPKLESEFVYGDYKVYDVRKMIAKSEQEIGKATAKYFFYSNIMNFFKTEITLANGEIRKRPLIETNGETGEIVWDKGRDFATVRKVLSMPQVNIVKKTEVQTGGFSKESILPKRNSDKLIARKKDWDPKKYGGFDSPTVAYSVLVVAKVEKGKSKKLKSVKELLGITIMERSSFEKNPIDFLEAKGYKEVKKDLIIKLPKYSLFELENGRKRMLASAGELQKGNELALPSKYVNFLYLASHYEKLKGSPEDNEQKQLFVEQHKHYLDEIIEQISEFSKRVILADANLDKVLSAYNKHRDKPIREQAENIIHLFTLTNLGAPAAFKYFDTTIDRKRYTSTKEVLDATLIHQSITGLYETRIDLSQLGGDGGPAPAPAPAPAPAPGGTLNIEDEHRLHETSKEPDVSLGSTWLSDFPQAWAETGGMGLAVRQAPLIIPLKATSTPVSIKQYPMSQEARLGIKPHIQRLLDQGILVPCQSPWNTPLLPVKKPGTNDYRPVQDLREVNKRVEDIHPTVPNPYNLLSGLPPSHQWYTVLDLKDAFFCLRLHPTSQPLFAFEWRDPEMGISGQLTWTRLPQGFKNSPTLFNEALHRDLADFRIQHPDLILLQYVDDLLLAATSELDCQQGTRALLQTLGNLGYRASAKKAQICQKQVKYLGYLLKEGQRWLTEARKETVMGQPTPKTPRQLREFLGKAGFCRLFIPGFAEMAAPLYPLTKPGTLFNWGPDQQKAYQEIKQALLTAPALGLPDLTKPFELFVDEKQGYAKGVLTQKLGPWRRPVAYLSKKLDPVAAGWPPCLRMVAAIAVLTKDAGKLTMGQPLVILAPHAVEALVKQPPDRWLSNARMTHYQALLLDTDRVQFGPVVALNPATLLPLPEEGLQHNCLDILAEAHGTRPDLTDQPLPDADHTWYTDGSSLLQEGQRKAGAAVTTETEVIWAKALPAGTSAQRAELIALTQALKMAEGKKLNVYTDSRYAFATAHIHGEIYRRRGWLTSEGKEIKNKDEILALLKALFLPKRLSIIHCPGHQKGHSAEARGNRMADQAARKAAITETPDTSTLLAGKRTADGSEFEKRTADGSEFESPKKKAKVE

SEQ ID NO: 2798 - protein, 2096 aa, synthetic construct
  source 1..2096: note = Description of Artificial Sequence: Synthetic polypeptide
MPAAKRVKLDGGDKKYSIGLDIGTNSVGWAVITDEYKVPSKKFKVLGNTDRHSIKKNLIGALLFDSGETAEATRLKRTARRRYTRRKNRICYLQEIFSNEMAKVDDSFFHRLEESFLVEEDKKHERHPIFGNIVDEVAYHEKYPTIYHLRKKLVDSTDKADLRLIYLALAHMIKFRGHFLIEGDLNPDNSDVDKLFIQLVQTYNQLFEENPINASGVDAKAILSARLSKSRRLENLIAQLPGEKKNGLFGNLIALSLGLTPNFKSNFDLAEDAKLQLSKDTYDDDLDNLLAQIGDQYADLFLAAKNLSDAILLSDILRVNTEITKAPLSASMIKRYDEHHQDLTLLKALVRQQLPEKYKEIFFDQSKNGYAGYIDGGASQEEFYKFIKPILEKMDGTEELLVKLNREDLLRKQRTFDNGSIPHQIHLGELHAILRRQEDFYPFLKDNREKIEKILTFRIPYYVGPLARGNSRFAWMTRKSEETITPWNFEEVVDKGASAQSFIERMTNFDKNLPNEKVLPKHSLLYEYFTVYNELTKVKYVTEGMRKPAFLSGEQKKAIVDLLFKTNRKVTVKQLKEDYFKKIECFDSVEISGVEDRFNASLGTYHDLLKIIKDKDFLDNEENEDILEDIVLTLTLFEDREMIEERLKTYAHLFDDKVMKQLKRRRYTGWGRLSRKLINGIRDKQSGKTILDFLKSDGFANRNFMQLIHDDSLTFKEDIQKAQVSGQGDSLHEHIANLAGSPAIKKGILQTVKVVDELVKVMGRHKPENIVIEMARENQTTQKGQKNSRERMKRIEEGIKELGSQILKEHPVENTQLQNEKLYLYYLQNGRDMYVDQELDINRLSDYDVDHIVPQSFLKDDSIDNKVLTRSDKARGKSDNVPSEEVVKKMKNYWRQLLNAKLITQRKFDNLTKAERGGLSELDKAGFIKRQLVETRQITKHVAQILDSRMNTKYDENDKLIREVKVITLKSKLVSDFRKDFQFYKVREINNYHHAHDAYLNAVVGTALIKKYPKLESEFVYGDYKVYDVRKMIAKSEQEIGKATAKYFFYSNIMNFFKTEITLANGEIRKRPLIETNGETGEIVWDKGRDFATVRKVLSMPQVNIVKKTEVQTGGFSKESILPKRNSDKLIARKKDWDPKKYGGFDSPTVAYSVLVVAKVEKGKSKKLKSVKELLGITIMERSSFEKNPIDFLEAKGYKEVKKDLIIKLPKYSLFELENGRKRMLASAGELQKGNELALPSKYVNFLYLASHYEKLKGSPEDNEQKQLFVEQHKHYLDEIIEQISEFSKRVILADANLDKVLSAYNKHRDKPIREQAENIIHLFTLTNLGAPAAFKYFDTTIDRKRYTSTKEVLDATLIHQSITGLYETRIDLSQLGGDGGPAPGSSEAAAKGGTLNIEDEHRLHETSKEPDVSLGSTWLSDFPQAWAETGGMGLAVRQAPLIIPLKATSTPVSIKQYPMSQEARLGIKPHIQRLLDQGILVPCQSPWNTPLLPVKKPGTNDYRPVQDLREVNKRVEDIHPTVPNPYNLLSGLPPSHQWYTVLDLKDAFFCLRLHPTSQPLFAFEWRDPEMGISGQLTWTRLPQGFKNSPTLFNEALHRDLADFRIQHPDLILLQYVDDLLLAATSELDCQQGTRALLQTLGNLGYRASAKKAQICQKQVKYLGYLLKEGQRWLTEARKETVMGQPTPKTPRQLREFLGKAGFCRLFIPGFAEMAAPLYPLTKPGTLFNWGPDQQKAYQEIKQALLTAPALGLPDLTKPFELFVDEKQGYAKGVLTQKLGPWRRPVAYLSKKLDPVAAGWPPCLRMVAAIAVLTKDAGKLTMGQPLVILAPHAVEALVKQPPDRWLSNARMTHYQALLLDTDRVQFGPVVALNPATLLPLPEEGLQHNCLDILAEAHGTRPDLTDQPLPDADHTWYTDGSSLLQEGQRKAGAAVTTETEVIWAKALPAGTSAQRAELIALTQALKMAEGKKLNVYTDSRYAFATAHIHGEIYRRRGWLTSEGKEIKNKDEILALLKALFLPKRLSIIHCPGHQKGHSAEARGNRMADQAARKAAITETPDTSTLLAGKRTADGSEFEKRTADGSEFESPKKKAKVE

SEQ ID NO: 2799 - protein, 2096 aa, synthetic construct
  source 1..2096: note = Description of Artificial Sequence: Synthetic polypeptide
MPAAKRVKLDGGDKKYSIGLDIGTNSVGWAVITDEYKVPSKKFKVLGNTDRHSIKKNLIGALLFDSGETAEATRLKRTARRRYTRRKNRICYLQEIFSNEMAKVDDSFFHRLEESFLVEEDKKHERHPIFGNIVDEVAYHEKYPTIYHLRKKLVDSTDKADLRLIYLALAHMIKFRGHFLIEGDLNPDNSDVDKLFIQLVQTYNQLFEENPINASGVDAKAILSARLSKSRRLENLIAQLPGEKKNGLFGNLIALSLGLTPNFKSNFDLAEDAKLQLSKDTYDDDLDNLLAQIGDQYADLFLAAKNLSDAILLSDILRVNTEITKAPLSASMIKRYDEHHQDLTLLKALVRQQLPEKYKEIFFDQSKNGYAGYIDGGASQEEFYKFIKPILEKMDGTEELLVKLNREDLLRKQRTFDNGSIPHQIHLGELHAILRRQEDFYPFLKDNREKIEKILTFRIPYYVGPLARGNSRFAWMTRKSEETITPWNFEEVVDKGASAQSFIERMTNFDKNLPNEKVLPKHSLLYEYFTVYNELTKVKYVTEGMRKPAFLSGEQKKAIVDLLFKTNRKVTVKQLKEDYFKKIECFDSVEISGVEDRFNASLGTYHDLLKIIKDKDFLDNEENEDILEDIVLTLTLFEDREMIEERLKTYAHLFDDKVMKQLKRRRYTGWGRLSRKLINGIRDKQSGKTILDFLKSDGFANRNFMQLIHDDSLTFKEDIQKAQVSGQGDSLHEHIANLAGSPAIKKGILQTVKVVDELVKVMGRHKPENIVIEMARENQTTQKGQKNSRERMKRIEEGIKELGSQILKEHPVENTQLQNEKLYLYYLQNGRDMYVDQELDINRLSDYDVDHIVPQSFLKDDSIDNKVLTRSDKARGKSDNVPSEEVVKKMKNYWRQLLNAKLITQRKFDNLTKAERGGLSELDKAGFIKRQLVETRQITKHVAQILDSRMNTKYDENDKLIREVKVITLKSKLVSDFRKDFQFYKVREINNYHHAHDAYLNAVVGTALIKKYPKLESEFVYGDYKVYDVRKMIAKSEQEIGKATAKYFFYSNIMNFFKTEITLANGEIRKRPLIETNGETGEIVWDKGRDFATVRKVLSMPQVNIVKKTEVQTGGFSKESILPKRNSDKLIARKKDWDPKKYGGFDSPTVAYSVLVVAKVEKGKSKKLKSVKELLGITIMERSSFEKNPIDFLEAKGYKEVKKDLIIKLPKYSLFELENGRKRMLASAGELQKGNELALPSKYVNFLYLASHYEKLKGSPEDNEQKQLFVEQHKHYLDEIIEQISEFSKRVILADANLDKVLSAYNKHRDKPIREQAENIIHLFTLTNLGAPAAFKYFDTTIDRKRYTSTKEVLDATLIHQSITGLYETRIDLSQLGGDGGEAAAKGSSGGSGGTLNIEDEHRLHETSKEPDVSLGSTWLSDFPQAWAETGGMGLAVRQAPLIIPLKATSTPVSIKQYPMSQEARLGIKPHIQRLLDQGILVPCQSPWNTPLLPVKKPGTNDYRPVQDLREVNKRVEDIHPTVPNPYNLLSGLPPSHQWYTVLDLKDAFFCLRLHPTSQPLFAFEWRDPEMGISGQLTWTRLPQGFKNSPTLFNEALHRDLADFRIQHPDLILLQYVDDLLLAATSELDCQQGTRALLQTLGNLGYRASAKKAQICQKQVKYLGYLLKEGQRWLTEARKETVMGQPTPKTPRQLREFLGKAGFCRLFIPGFAEMAAPLYPLTKPGTLFNWGPDQQKAYQEIKQALLTAPALGLPDLTKPFELFVDEKQGYAKGVLTQKLGPWRRPVAYLSKKLDPVAAGWPPCLRMVAAIAVLTKDAGKLTMGQPLVILAPHAVEALVKQPPDRWLSNARMTHYQALLLDTDRVQFGPVVALNPATLLPLPEEGLQHNCLDILAEAHGTRPDLTDQPLPDADHTWYTDGSSLLQEGQRKAGAAVTTETEVIWAKALPAGTSAQRAELIALTQALKMAEGKKLNVYTDSRYAFATAHIHGEIYRRRGWLTSEGKEIKNKDEILALLKALFLPKRLSIIHCPGHQKGHSAEARGNRMADQAARKAAITETPDTSTLLAGKRTADGSEFEKRTADGSEFESPKKKAKVE

SEQ ID NO: 2800 - protein, 2094 aa, synthetic construct
  source 1..2094: note = Description of Artificial Sequence: Synthetic polypeptide
MPAAKRVKLDGGDKKYSIGLDIGTNSVGWAVITDEYKVPSKKFKVLGNTDRHSIKKNLIGALLFDSGETAEATRLKRTARRRYTRRKNRICYLQEIFSNEMAKVDDSFFHRLEESFLVEEDKKHERHPIFGNIVDEVAYHEKYPTIYHLRKKLVDSTDKADLRLIYLALAHMIKFRGHFLIEGDLNPDNSDVDKLFIQLVQTYNQLFEENPINASGVDAKAILSARLSKSRRLENLIAQLPGEKKNGLFGNLIALSLGLTPNFKSNFDLAEDAKLQLSKDTYDDDLDNLLAQIGDQYADLFLAAKNLSDAILLSDILRVNTEITKAPLSASMIKRYDEHHQDLTLLKALVRQQLPEKYKEIFFDQSKNGYAGYIDGGASQEEFYKFIKPILEKMDGTEELLVKLNREDLLRKQRTFDNGSIPHQIHLGELHAILRRQEDFYPFLKDNREKIEKILTFRIPYYVGPLARGNSRFAWMTRKSEETITPWNFEEVVDKGASAQSFIERMTNFDKNLPNEKVLPKHSLLYEYFTVYNELTKVKYVTEGMRKPAFLSGEQKKAIVDLLFKTNRKVTVKQLKEDYFKKIECFDSVEISGVEDRFNASLGTYHDLLKIIKDKDFLDNEENEDILEDIVLTLTLFEDREMIEERLKTYAHLFDDKVMKQLKRRRYTGWGRLSRKLINGIRDKQSGKTILDFLKSDGFANRNFMQLIHDDSLTFKEDIQKAQVSGQGDSLHEHIANLAGSPAIKKGILQTVKVVDELVKVMGRHKPENIVIEMARENQTTQKGQKNSRERMKRIEEGIKELGSQILKEHPVENTQLQNEKLYLYYLQNGRDMYVDQELDINRLSDYDVDHIVPQSFLKDDSIDNKVLTRSDKARGKSDNVPSEEVVKKMKNYWRQLLNAKLITQRKFDNLTKAERGGLSELDKAGFIKRQLVETRQITKHVAQILDSRMNTKYDENDKLIREVKVITLKSKLVSDFRKDFQFYKVREINNYHHAHDAYLNAVVGTALIKKYPKLESEFVYGDYKVYDVRKMIAKSEQEIGKATAKYFFYSNIMNFFKTEITLANGEIRKRPLIETNGETGEIVWDKGRDFATVRKVLSMPQVNIVKKTEVQTGGFSKESILPKRNSDKLIARKKDWDPKKYGGFDSPTVAYSVLVVAKVEKGKSKKLKSVKELLGITIMERSSFEKNPIDFLEAKGYKEVKKDLIIKLPKYSLFELENGRKRMLASAGELQKGNELALPSKYVNFLYLASHYEKLKGSPEDNEQKQLFVEQHKHYLDEIIEQISEFSKRVILADANLDKVLSAYNKHRDKPIREQAENIIHLFTLTNLGAPAAFKYFDTTIDRKRYTSTKEVLDATLIHQSITGLYETRIDLSQLGGDGGGGGPAPGGSGGTLNIEDEHRLHETSKEPDVSLGSTWLSDFPQAWAETGGMGLAVRQAPLIIPLKATSTPVSIKQYPMSQEARLGIKPHIQRLLDQGILVPCQSPWNTPLLPVKKPGTNDYRPVQDLREVNKRVEDIHPTVPNPYNLLSGLPPSHQWYTVLDLKDAFFCLRLHPTSQPLFAFEWRDPEMGISGQLTWTRLPQGFKNSPTLFNEALHRDLADFRIQHPDLILLQYVDDLLLAATSELDCQQGTRALLQTLGNLGYRASAKKAQICQKQVKYLGYLLKEGQRWLTEARKETVMGQPTPKTPRQLREFLGKAGFCRLFIPGFAEMAAPLYPLTKPGTLFNWGPDQQKAYQEIKQALLTAPALGLPDLTKPFELFVDEKQGYAKGVLTQKLGPWRRPVAYLSKKLDPVAAGWPPCLRMVAAIAVLTKDAGKLTMGQPLVILAPHAVEALVKQPPDRWLSNARMTHYQALLLDTDRVQFGPVVALNPATLLPLPEEGLQHNCLDILAEAHGTRPDLTDQPLPDADHTWYTDGSSLLQEGQRKAGAAVTTETEVIWAKALPAGTSAQRAELIALTQALKMAEGKKLNVYTDSRYAFATAHIHGEIYRRRGWLTSEGKEIKNKDEILALLKALFLPKRLSIIHCPGHQKGHSAEARGNRMADQAARKAAITETPDTSTLLAGKRTADGSEFEKRTADGSEFESPKKKAKVE

SEQ ID NO: 2801 - protein, 2094 aa, synthetic construct
  source 1..2094: note = Description of Artificial Sequence: Synthetic polypeptide
MPAAKRVKLDGGDKKYSIGLDIGTNSVGWAVITDEYKVPSKKFKVLGNTDRHSIKKNLIGALLFDSGETAEATRLKRTARRRYTRRKNRICYLQEIFSNEMAKVDDSFFHRLEESFLVEEDKKHERHPIFGNIVDEVAYHEKYPTIYHLRKKLVDSTDKADLRLIYLALAHMIKFRGHFLIEGDLNPDNSDVDKLFIQLVQTYNQLFEENPINASGVDAKAILSARLSKSRRLENLIAQLPGEKKNGLFGNLIALSLGLTPNFKSNFDLAEDAKLQLSKDTYDDDLDNLLAQIGDQYADLFLAAKNLSDAILLSDILRVNTEITKAPLSASMIKRYDEHHQDLTLLKALVRQQLPEKYKEIFFDQSKNGYAGYIDGGASQEEFYKFIKPILEKMDGTEELLVKLNREDLLRKQRTFDNGSIPHQIHLGELHAILRRQEDFYPFLKDNREKIEKILTFRIPYYVGPLARGNSRFAWMTRKSEETITPWNFEEVVDKGASAQSFIERMTNFDKNLPNEKVLPKHSLLYEYFTVYNELTKVKYVTEGMRKPAFLSGEQKKAIVDLLFKTNRKVTVKQLKEDYFKKIECFDSVEISGVEDRFNASLGTYHDLLKIIKDKDFLDNEENEDILEDIVLTLTLFEDREMIEERLKTYAHLFDDKVMKQLKRRRYTGWGRLSRKLINGIRDKQSGKTILDFLKSDGFANRNFMQLIHDDSLTFKEDIQKAQVSGQGDSLHEHIANLAGSPAIKKGILQTVKVVDELVKVMGRHKPENIVIEMARENQTTQKGQKNSRERMKRIEEGIKELGSQILKEHPVENTQLQNEKLYLYYLQNGRDMYVDQELDINRLSDYDVDHIVPQSFLKDDSIDNKVLTRSDKARGKSDNVPSEEVVKKMKNYWRQLLNAKLITQRKFDNLTKAERGGLSELDKAGFIKRQLVETRQITKHVAQILDSRMNTKYDENDKLIREVKVITLKSKLVSDFRKDFQFYKVREINNYHHAHDAYLNAVVGTALIKKYPKLESEFVYGDYKVYDVRKMIAKSEQEIGKATAKYFFYSNIMNFFKTEITLANGEIRKRPLIETNGETGEIVWDKGRDFATVRKVLSMPQVNIVKKTEVQTGGFSKESILPKRNSDKLIARKKDWDPKKYGGFDSPTVAYSVLVVAKVEKGKSKKLKSVKELLGITIMERSSFEKNPIDFLEAKGYKEVKKDLIIKLPKYSLFELENGRKRMLASAGELQKGNELALPSKYVNFLYLASHYEKLKGSPEDNEQKQLFVEQHKHYLDEIIEQISEFSKRVILADANLDKVLSAYNKHRDKPIREQAENIIHLFTLTNLGAPAAFKYFDTTIDRKRYTSTKEVLDATLIHQSITGLYETRIDLSQLGGDGGGGSPAPGGGGGTLNIEDEHRLHETSKEPDVSLGSTWLSDFPQAWAETGGMGLAVRQAPLIIPLKATSTPVSIKQYPMSQEARLGIKPHIQRLLDQGILVPCQSPWNTPLLPVKKPGTNDYRPVQDLREVNKRVEDIHPTVPNPYNLLSGLPPSHQWYTVLDLKDAFFCLRLHPTSQPLFAFEWRDPEMGISGQLTWTRLPQGFKNSPTLFNEALHRDLADFRIQHPDLILLQYVDDLLLAATSELDCQQGTRALLQTLGNLGYRASAKKAQICQKQVKYLGYLLKEGQRWLTEARKETVMGQPTPKTPRQLREFLGKAGFCRLFIPGFAEMAAPLYPLTKPGTLFNWGPDQQKAYQEIKQALLTAPALGLPDLTKPFELFVDEKQGYAKGVLTQKLGPWRRPVAYLSKKLDPVAAGWPPCLRMVAAIAVLTKDAGKLTMGQPLVILAPHAVEALVKQPPDRWLSNARMTHYQALLLDTDRVQFGPVVALNPATLLPLPEEGLQHNCLDILAEAHGTRPDLTDQPLPDADHTWYTDGSSLLQEGQRKAGAAVTTETEVIWAKALPAGTSAQRAELIALTQALKMAEGKKLNVYTDSRYAFATAHIHGEIYRRRGWLTSEGKEIKNKDEILALLKALFLPKRLSIIHCPGHQKGHSAEARGNRMADQAARKAAITETPDTSTLLAGKRTADGSEFEKRTADGSEFESPKKKAKVE

SEQ ID NO: 2802 - protein, 2100 aa, synthetic construct
  source 1..2100: note = Description of Artificial Sequence: Synthetic polypeptide
MPAAKRVKLDGGDKKYSIGLDIGTNSVGWAVITDEYKVPSKKFKVLGNTDRHSIKKNLIGALLFDSGETAEATRLKRTARRRYTRRKNRICYLQEIFSNEMAKVDDSFFHRLEESFLVEEDKKHERHPIFGNIVDEVAYHEKYPTIYHLRKKLVDSTDKADLRLIYLALAHMIKFRGHFLIEGDLNPDNSDVDKLFIQLVQTYNQLFEENPINASGVDAKAILSARLSKSRRLENLIAQLPGEKKNGLFGNLIALSLGLTPNFKSNFDLAEDAKLQLSKDTYDDDLDNLLAQIGDQYADLFLAAKNLSDAILLSDILRVNTEITKAPLSASMIKRYDEHHQDLTLLKALVRQQLPEKYKEIFFDQSKNGYAGYIDGGASQEEFYKFIKPILEKMDGTEELLVKLNREDLLRKQRTFDNGSIPHQIHLGELHAILRRQEDFYPFLKDNREKIEKILTFRIPYYVGPLARGNSRFAWMTRKSEETITPWNFEEVVDKGASAQSFIERMTNFDKNLPNEKVLPKHSLLYEYFTVYNELTKVKYVTEGMRKPAFLSGEQKKAIVDLLFKTNRKVTVKQLKEDYFKKIECFDSVEISGVEDRFNASLGTYHDLLKIIKDKDFLDNEENEDILEDIVLTLTLFEDREMIEERLKTYAHLFDDKVMKQLKRRRYTGWGRLSRKLINGIRDKQSGKTILDFLKSDGFANRNFMQLIHDDSLTFKEDIQKAQVSGQGDSLHEHIANLAGSPAIKKGILQTVKVVDELVKVMGRHKPENIVIEMARENQTTQKGQKNSRERMKRIEEGIKELGSQILKEHPVENTQLQNEKLYLYYLQNGRDMYVDQELDINRLSDYDVDHIVPQSFLKDDSIDNKVLTRSDKARGKSDNVPSEEVVKKMKNYWRQLLNAKLITQRKFDNLTKAERGGLSELDKAGFIKRQLVETRQITKHVAQILDSRMNTKYDENDKLIREVKVITLKSKLVSDFRKDFQFYKVREINNYHHAHDAYLNAVVGTALIKKYPKLESEFVYGDYKVYDVRKMIAKSEQEIGKATAKYFFYSNIMNFFKTEITLANGEIRKRPLIETNGETGEIVWDKGRDFATVRKVLSMPQVNIVKKTEVQTGGFSKESILPKRNSDKLIARKKDWDPKKYGGFDSPTVAYSVLVVAKVEKGKSKKLKSVKELLGITIMERSSFEKNPIDFLEAKGYKEVKKDLIIKLPKYSLFELENGRKRMLASAGELQKGNELALPSKYVNFLYLASHYEKLKGSPEDNEQKQLFVEQHKHYLDEIIEQISEFSKRVILADANLDKVLSAYNKHRDKPIREQAENIIHLFTLTNLGAPAAFKYFDTTIDRKRYTSTKEVLDATLIHQSITGLYETRIDLSQLGGDGGGSSGSSGSSGSSGSSGGTLNIEDEHRLHETSKEPDVSLGSTWLSDFPQAWAETGGMGLAVRQAPLIIPLKATSTPVSIKQYPMSQEARLGIKPHIQRLLDQGILVPCQSPWNTPLLPVKKPGTNDYRPVQDLREVNKRVEDIHPTVPNPYNLLSGLPPSHQWYTVLDLKDAFFCLRLHPTSQPLFAFEWRDPEMGISGQLTWTRLPQGFKNSPTLFNEALHRDLADFRIQHPDLILLQYVDDLLLAATSELDCQQGTRALLQTLGNLGYRASAKKAQICQKQVKYLGYLLKEGQRWLTEARKETVMGQPTPKTPRQLREFLGKAGFCRLFIPGFAEMAAPLYPLTKPGTLFNWGPDQQKAYQEIKQALLTAPALGLPDLTKPFELFVDEKQGYAKGVLTQKLGPWRRPVAYLSKKLDPVAAGWPPCLRMVAAIAVLTKDAGKLTMGQPLVILAPHAVEALVKQPPDRWLSNARMTHYQALLLDTDRVQFGPVVALNPATLLPLPEEGLQHNCLDILAEAHGTRPDLTDQPLPDADHTWYTDGSSLLQEGQRKAGAAVTTETEVIWAKALPAGTSAQRAELIALTQALKMAEGKKLNVYTDSRYAFATAHIHGEIYRRRGWLTSEGKEIKNKDEILALLKALFLPKRLSIIHCPGHQKGHSAEARGNRMADQAARKAAITETPDTSTLLAGKRTADGSEFEKRTADGSEFESPKKKAKVE

SEQ ID NO: 2803 - protein, 2110 aa, synthetic construct
  source 1..2110: note = Description of Artificial Sequence: Synthetic polypeptide
MPAAKRVKLDGGDKKYSIGLDIGTNSVGWAVITDEYKVPSKKFKVLGNTDRHSIKKNLIGALLFDSGETAEATRLKRTARRRYTRRKNRICYLQEIFSNEMAKVDDSFFHRLEESFLVEEDKKHERHPIFGNIVDEVAYHEKYPTIYHLRKKLVDSTDKADLRLIYLALAHMIKFRGHFLIEGDLNPDNSDVDKLFIQLVQTYNQLFEENPINASGVDAKAILSARLSKSRRLENLIAQLPGEKKNGLFGNLIALSLGLTPNFKSNFDLAEDAKLQLSKDTYDDDLDNLLAQIGDQYADLFLAAKNLSDAILLSDILRVNTEITKAPLSASMIKRYDEHHQDLTLLKALVRQQLPEKYKEIFFDQSKNGYAGYIDGGASQEEFYKFIKPILEKMDGTEELLVKLNREDLLRKQRTFDNGSIPHQIHLGELHAILRRQEDFYPFLKDNREKIEKILTFRIPYYVGPLARGNSRFAWMTRKSEETITPWNFEEVVDKGASAQSFIERMTNFDKNLPNEKVLPKHSLLYEYFTVYNELTKVKYVTEGMRKPAFLSGEQKKAIVDLLFKTNRKVTVKQLKEDYFKKIECFDSVEISGVEDRFNASLGTYHDLLKIIKDKDFLDNEENEDILEDIVLTLTLFEDREMIEERLKTYAHLFDDKVMKQLKRRRYTGWGRLSRKLINGIRDKQSGKTILDFLKSDGFANRNFMQLIHDDSLTFKEDIQKAQVSGQGDSLHEHIANLAGSPAIKKGILQTVKVVDELVKVMGRHKPENIVIEMARENQTTQKGQKNSRERMKRIEEGIKELGSQILKEHPVENTQLQNEKLYLYYLQNGRDMYVDQELDINRLSDYDVDHIVPQSFLKDDSIDNKVLTRSDKARGKSDNVPSEEVVKKMKNYWRQLLNAKLITQRKFDNLTKAERGGLSELDKAGFIKRQLVETRQITKHVAQILDSRMNTKYDENDKLIREVKVITLKSKLVSDFRKDFQFYKVREINNYHHAHDAYLNAVVGTALIKKYPKLESEFVYGDYKVYDVRKMIAKSEQEIGKATAKYFFYSNIMNFFKTEITLANGEIRKRPLIETNGETGEIVWDKGRDFATVRKVLSMPQVNIVKKTEVQTGGFSKESILPKRNSDKLIARKKDWDPKKYGGFDSPTVAYSVLVVAKVEKGKSKKLKSVKELLGITIMERSSFEKNPIDFLEAKGYKEVKKDLIIKLPKYSLFELENGRKRMLASAGELQKGNELALPSKYVNFLYLASHYEKLKGSPEDNEQKQLFVEQHKHYLDEIIEQISEFSKRVILADANLDKVLSAYNKHRDKPIREQAENIIHLFTLTNLGAPAAFKYFDTTIDRKRYTSTKEVLDATLIHQSITGLYETRIDLSQLGGDGGEAAAKEAAAKEAAAKEAAAKEAAAKGGTLNIEDEHRLHETSKEPDVSLGSTWLSDFPQAWAETGGMGLAVRQAPLIIPLKATSTPVSIKQYPMSQEARLGIKPHIQRLLDQGILVPCQSPWNTPLLPVKKPGTNDYRPVQDLREVNKRVEDIHPTVPNPYNLLSGLPPSHQWYTVLDLKDAFFCLRLHPTSQPLFAFEWRDPEMGISGQLTWTRLPQGFKNSPTLFNEALHRDLADFRIQHPDLILLQYVDDLLLAATSELDCQQGTRALLQTLGNLGYRASAKKAQICQKQVKYLGYLLKEGQRWLTEARKETVMGQPTPKTPRQLREFLGKAGFCRLFIPGFAEMAAPLYPLTKPGTLFNWGPDQQKAYQEIKQALLTAPALGLPDLTKPFELFVDEKQGYAKGVLTQKLGPWRRPVAYLSKKLDPVAAGWPPCLRMVAAIAVLTKDAGKLTMGQPLVILAPHAVEALVKQPPDRWLSNARMTHYQALLLDTDRVQFGPVVALNPATLLPLPEEGLQHNCLDILAEAHGTRPDLTDQPLPDADHTWYTDGSSLLQEGQRKAGAAVTTETEVIWAKALPAGTSAQRAELIALTQALKMAEGKKLNVYTDSRYAFATAHIHGEIYRRRGWLTSEGKEIKNKDEILALLKALFLPKRLSIIHCPGHQKGHSAEARGNRMADQAARKAAITETPDTSTLLAGKRTADGSEFEKRTADGSEFESPKKKAKVE

SEQ ID NO: 2804 - protein, 2094 aa, synthetic construct
  source 1..2094: note = Description of Artificial Sequence: Synthetic polypeptide
MPAAKRVKLDGGDKKYSIGLDIGTNSVGWAVITDEYKVPSKKFKVLGNTDRHSIKKNLIGALLFDSGETAEATRLKRTARRRYTRRKNRICYLQEIFSNEMAKVDDSFFHRLEESFLVEEDKKHERHPIFGNIVDEVAYHEKYPTIYHLRKKLVDSTDKADLRLIYLALAHMIKFRGHFLIEGDLNPDNSDVDKLFIQLVQTYNQLFEENPINASGVDAKAILSARLSKSRRLENLIAQLPGEKKNGLFGNLIALSLGLTPNFKSNFDLAEDAKLQLSKDTYDDDLDNLLAQIGDQYADLFLAAKNLSDAILLSDILRVNTEITKAPLSASMIKRYDEHHQDLTLLKALVRQQLPEKYKEIFFDQSKNGYAGYIDGGASQEEFYKFIKPILEKMDGTEELLVKLNREDLLRKQRTFDNGSIPHQIHLGELHAILRRQEDFYPFLKDNREKIEKILTFRIPYYVGPLARGNSRFAWMTRKSEETITPWNFEEVVDKGASAQSFIERMTNFDKNLPNEKVLPKHSLLYEYFTVYNELTKVKYVTEGMRKPAFLSGEQKKAIVDLLFKTNRKVTVKQLKEDYFKKIECFDSVEISGVEDRFNASLGTYHDLLKIIKDKDFLDNEENEDILEDIVLTLTLFEDREMIEERLKTYAHLFDDKVMKQLKRRRYTGWGRLSRKLINGIRDKQSGKTILDFLKSDGFANRNFMQLIHDDSLTFKEDIQKAQVSGQGDSLHEHIANLAGSPAIKKGILQTVKVVDELVKVMGRHKPENIVIEMARENQTTQKGQKNSRERMKRIEEGIKELGSQILKEHPVENTQLQNEKLYLYYLQNGRDMYVDQELDINRLSDYDVDHIVPQSFLKDDSIDNKVLTRSDKARGKSDNVPSEEVVKKMKNYWRQLLNAKLITQRKFDNLTKAERGGLSELDKAGFIKRQLVETRQITKHVAQILDSRMNTKYDENDKLIREVKVITLKSKLVSDFRKDFQFYKVREINNYHHAHDAYLNAVVGTALIKKYPKLESEFVYGDYKVYDVRKMIAKSEQEIGKATAKYFFYSNIMNFFKTEITLANGEIRKRPLIETNGETGEIVWDKGRDFATVRKVLSMPQVNIVKKTEVQTGGFSKESILPKRNSDKLIARKKDWDPKKYGGFDSPTVAYSVLVVAKVEKGKSKKLKSVKELLGITIMERSSFEKNPIDFLEAKGYKEVKKDLIIKLPKYSLFELENGRKRMLASAGELQKGNELALPSKYVNFLYLASHYEKLKGSPEDNEQKQLFVEQHKHYLDEIIEQISEFSKRVILADANLDKVLSAYNKHRDKPIREQAENIIHLFTLTNLGAPAAFKYFDTTIDRKRYTSTKEVLDATLIHQSITGLYETRIDLSQLGGDGGGGSGGGPAPGGTLNIEDEHRLHETSKEPDVSLGSTWLSDFPQAWAETGGMGLAVRQAPLIIPLKATSTPVSIKQYPMSQEARLGIKPHIQRLLDQGILVPCQSPWNTPLLPVKKPGTNDYRPVQDLREVNKRVEDIHPTVPNPYNLLSGLPPSHQWYTVLDLKDAFFCLRLHPTSQPLFAFEWRDPEMGISGQLTWTRLPQGFKNSPTLFNEALHRDLADFRIQHPDLILLQYVDDLLLAATSELDCQQGTRALLQTLGNLGYRASAKKAQICQKQVKYLGYLLKEGQRWLTEARKETVMGQPTPKTPRQLREFLGKAGFCRLFIPGFAEMAAPLYPLTKPGTLFNWGPDQQKAYQEIKQALLTAPALGLPDLTKPFELFVDEKQGYAKGVLTQKLGPWRRPVAYLSKKLDPVAAGWPPCLRMVAAIAVLTKDAGKLTMGQPLVILAPHAVEALVKQPPDRWLSNARMTHYQALLLDTDRVQFGPVVALNPATLLPLPEEGLQHNCLDILAEAHGTRPDLTDQPLPDADHTWYTDGSSLLQEGQRKAGAAVTTETEVIWAKALPAGTSAQRAELIALTQALKMAEGKKLNVYTDSRYAFATAHIHGEIYRRRGWLTSEGKEIKNKDEILALLKALFLPKRLSIIHCPGHQKGHSAEARGNRMADQAARKAAITETPDTSTLLAGKRTADGSEFEKRTADGSEFESPKKKAKVE

SEQ ID NO: 2805 - protein, 2096 aa, synthetic construct
  source 1..2096: note = Description of Artificial Sequence: Synthetic polypeptide
MPAAKRVKLDGGDKKYSIGLDIGTNSVGWAVITDEYKVPSKKFKVLGNTDRHSIKKNLIGALLFDSGETAEATRLKRTARRRYTRRKNRICYLQEIFSNEMAKVDDSFFHRLEESFLVEEDKKHERHPIFGNIVDEVAYHEKYPTIYHLRKKLVDSTDKADLRLIYLALAHMIKFRGHFLIEGDLNPDNSDVDKLFIQLVQTYNQLFEENPINASGVDAKAILSARLSKSRRLENLIAQLPGEKKNGLFGNLIALSLGLTPNFKSNFDLAEDAKLQLSKDTYDDDLDNLLAQIGDQYADLFLAAKNLSDAILLSDILRVNTEITKAPLSASMIKRYDEHHQDLTLLKALVRQQLPEKYKEIFFDQSKNGYAGYIDGGASQEEFYKFIKPILEKMDGTEELLVKLNREDLLRKQRTFDNGSIPHQIHLGELHAILRRQEDFYPFLKDNREKIEKILTFRIPYYVGPLARGNSRFAWMTRKSEETITPWNFEEVVDKGASAQSFIERMTNFDKNLPNEKVLPKHSLLYEYFTVYNELTKVKYVTEGMRKPAFLSGEQKKAIVDLLFKTNRKVTVKQLKEDYFKKIECFDSVEISGVEDRFNASLGTYHDLLKIIKDKDFLDNEENEDILEDIVLTLTLFEDREMIEERLKTYAHLFDDKVMKQLKRRRYTGWGRLSRKLINGIRDKQSGKTILDFLKSDGFANRNFMQLIHDDSLTFKEDIQKAQVSGQGDSLHEHIANLAGSPAIKKGILQTVKVVDELVKVMGRHKPENIVIEMARENQTTQKGQKNSRERMKRIEEGIKELGSQILKEHPVENTQLQNEKLYLYYLQNGRDMYVDQELDINRLSDYDVDHIVPQSFLKDDSIDNKVLTRSDKARGKSDNVPSEEVVKKMKNYWRQLLNAKLITQRKFDNLTKAERGGLSELDKAGFIKRQLVETRQITKHVAQILDSRMNTKYDENDKLIREVKVITLKSKLVSDFRKDFQFYKVREINNYHHAHDAYLNAVVGTALIKKYPKLESEFVYGDYKVYDVRKMIAKSEQEIGKATAKYFFYSNIMNFFKTEITLANGEIRKRPLIETNGETGEIVWDKGRDFATVRKVLSMPQVNIVKKTEVQTGGFSKESILPKRNSDKLIARKKDWDPKKYGGFDSPTVAYSVLVVAKVEKGKSKKLKSVKELLGITIMERSSFEKNPIDFLEAKGYKEVKKDLIIKLPKYSLFELENGRKRMLASAGELQKGNELALPSKYVNFLYLASHYEKLKGSPEDNEQKQLFVEQHKHYLDEIIEQISEFSKRVILADANLDKVLSAYNKHRDKPIREQAENIIHLFTLTNLGAPAAFKYFDTTIDRKRYTSTKEVLDATLIHQSITGLYETRIDLSQLGGDGGGGSPAPEAAAKGGTLNIEDEHRLHETSKEPDVSLGSTWLSDFPQAWAETGGMGLAVRQAPLIIPLKATSTPVSIKQYPMSQEARLGIKPHIQRLLDQGILVPCQSPWNTPLLPVKKPGTNDYRPVQDLREVNKRVEDIHPTVPNPYNLLSGLPPSHQWYTVLDLKDAFFCLRLHPTSQPLFAFEWRDPEMGISGQLTWTRLPQGFKNSPTLFNEALHRDLADFRIQHPDLILLQYVDDLLLAATSELDCQQGTRALLQTLGNLGYRASAKKAQICQKQVKYLGYLLKEGQRWLTEARKETVMGQPTPKTPRQLREFLGKAGFCRLFIPGFAEMAAPLYPLTKPGTLFNWGPDQQKAYQEIKQALLTAPALGLPDLTKPFELFVDEKQGYAKGVLTQKLGPWRRPVAYLSKKLDPVAAGWPPCLRMVAAIAVLTKDAGKLTMGQPLVILAPHAVEALVKQPPDRWLSNARMTHYQALLLDTDRVQFGPVVALNPATLLPLPEEGLQHNCLDILAEAHGTRPDLTDQPLPDADHTWYTDGSSLLQEGQRKAGAAVTTETEVIWAKALPAGTSAQRAELIALTQALKMAEGKKLNVYTDSRYAFATAHIHGEIYRRRGWLTSEGKEIKNKDEILALLKALFLPKRLSIIHCPGHQKGHSAEARGNRMADQAARKAAITETPDTSTLLAGKRTADGSEFEKRTADGSEFESPKKKAKVE

SEQ ID NO: 2806 - protein, 2097 aa, synthetic construct
  source 1..2097: note = Description of Artificial Sequence: Synthetic polypeptide
MPAAKRVKLDGGDKKYSIGLDIGTNSVGWAVITDEYKVPSKKFKVLGNTDRHSIKKNLIGALLFDSGETAEATRLKRTARRRYTRRKNRICYLQEIFSNEMAKVDDSFFHRLEESFLVEEDKKHERHPIFGNIVDEVAYHEKYPTIYHLRKKLVDSTDKADLRLIYLALAHMIKFRGHFLIEGDLNPDNSDVDKLFIQLVQTYNQLFEENPINASGVDAKAILSARLSKSRRLENLIAQLPGEKKNGLFGNLIALSLGLTPNFKSNFDLAEDAKLQLSKDTYDDDLDNLLAQIGDQYADLFLAAKNLSDAILLSDILRVNTEITKAPLSASMIKRYDEHHQDLTLLKALVRQQLPEKYKEIFFDQSKNGYAGYIDGGASQEEFYKFIKPILEKMDGTEELLVKLNREDLLRKQRTFDNGSIPHQIHLGELHAILRRQEDFYPFLKDNREKIEKILTFRIPYYVGPLARGNSRFAWMTRKSEETITPWNFEEVVDKGASAQSFIERMTNFDKNLPNEKVLPKHSLLYEYFTVYNELTKVKYVTEGMRKPAFLSGEQKKAIVDLLFKTNRKVTVKQLKEDYFKKIECFDSVEISGVEDRFNASLGTYHDLLKIIKDKDFLDNEENEDILEDIVLTLTLFEDREMIEERLKTYAHLFDDKVMKQLKRRRYTGWGRLSRKLINGIRDKQSGKTILDFLKSDGFANRNFMQLIHDDSLTFKEDIQKAQVSGQGDSLHEHIANLAGSPAIKKGILQTVKVVDELVKVMGRHKPENIVIEMARENQTTQKGQKNSRERMKRIEEGIKELGSQILKEHPVENTQLQNEKLYLYYLQNGRDMYVDQELDINRLSDYDVDHIVPQSFLKDDSIDNKVLTRSDKARGKSDNVPSEEVVKKMKNYWRQLLNAKLITQRKFDNLTKAERGGLSELDKAGFIKRQLVETRQITKHVAQILDSRMNTKYDENDKLIREVKVITLKSKLVSDFRKDFQFYKVREINNYHHAHDAYLNAVVGTALIKKYPKLESEFVYGDYKVYDVRKMIAKSEQEIGKATAKYFFYSNIMNFFKTEITLANGEIRKRPLIETNGETGEIVWDKGRDFATVRKVLSMPQVNIVKKTEVQTGGFSKESILPKRNSDKLIARKKDWDPKKYGGFDSPTVAYSVLVVAKVEKGKSKKLKSVKELLGITIMERSSFEKNPIDFLEAKGYKEVKKDLIIKLPKYSLFELENGRKRMLASAGELQKGNELALPSKYVNFLYLASHYEKLKGSPEDNEQKQLFVEQHKHYLDEIIEQISEFSKRVILADANLDKVLSAYNKHRDKPIREQAENIIHLFTLTNLGAPAAFKYFDTTIDRKRYTSTKEVLDATLIHQSITGLYETRIDLSQLGGDGGGSSGSSGSSGSSGGTLNIEDEHRLHETSKEPDVSLGSTWLSDFPQAWAETGGMGLAVRQAPLIIPLKATSTPVSIKQYPMSQEARLGIKPHIQRLLDQGILVPCQSPWNTPLLPVKKPGTNDYRPVQDLREVNKRVEDIHPTVPNPYNLLSGLPPSHQWYTVLDLKDAFFCLRLHPTSQPLFAFEWRDPEMGISGQLTWTRLPQGFKNSPTLFNEALHRDLADFRIQHPDLILLQYVDDLLLAATSELDCQQGTRALLQTLGNLGYRASAKKAQICQKQVKYLGYLLKEGQRWLTEARKETVMGQPTPKTPRQLREFLGKAGFCRLFIPGFAEMAAPLYPLTKPGTLFNWGPDQQKAYQEIKQALLTAPALGLPDLTKPFELFVDEKQGYAKGVLTQKLGPWRRPVAYLSKKLDPVAAGWPPCLRMVAAIAVLTKDAGKLTMGQPLVILAPHAVEALVKQPPDRWLSNARMTHYQALLLDTDRVQFGPVVALNPATLLPLPEEGLQHNCLDILAEAHGTRPDLTDQPLPDADHTWYTDGSSLLQEGQRKAGAAVTTETEVIWAKALPAGTSAQRAELIALTQALKMAEGKKLNVYTDSRYAFATAHIHGEIYRRRGWLTSEGKEIKNKDEILALLKALFLPKRLSIIHCPGHQKGHSAEARGNRMADQAARKAAITETPDTSTLLAGKRTADGSEFEKRTADGSEFESPKKKAKVE

SEQ ID NO: 2807 - protein, 2100 aa, synthetic construct
  source 1..2100: note = Description of Artificial Sequence: Synthetic polypeptide
MPAAKRVKLDGGDKKYSIGLDIGTNSVGWAVITDEYKVPSKKFKVLGNTDRHSIKKNLIGALLFDSGETAEATRLKRTARRRYTRRKNRICYLQEIFSNEMAKVDDSFFHRLEESFLVEEDKKHERHPIFGNIVDEVAYHEKYPTIYHLRKKLVDSTDKADLRLIYLALAHMIKFRGHFLIEGDLNPDNSDVDKLFIQLVQTYNQLFEENPINASGVDAKAILSARLSKSRRLENLIAQLPGEKKNGLFGNLIALSLGLTPNFKSNFDLAEDAKLQLSKDTYDDDLDNLLAQIGDQYADLFLAAKNLSDAILLSDILRVNTEITKAPLSASMIKRYDEHHQDLTLLKALVRQQLPEKYKEIFFDQSKNGYAGYIDGGASQEEFYKFIKPILEKMDGTEELLVKLNREDLLRKQRTFDNGSIPHQIHLGELHAILRRQEDFYPFLKDNREKIEKILTFRIPYYVGPLARGNSRFAWMTRKSEETITPWNFEEVVDKGASAQSFIERMTNFDKNLPNEKVLPKHSLLYEYFTVYNELTKVKYVTEGMRKPAFLSGEQKKAIVDLLFKTNRKVTVKQLKEDYFKKIECFDSVEISGVEDRFNASLGTYHDLLKIIKDKDFLDNEENEDILEDIVLTLTLFEDREMIEERLKTYAHLFDDKVMKQLKRRRYTGWGRLSRKLINGIRDKQSGKTILDFLKSDGFANRNFMQLIHDDSLTFKEDIQKAQVSGQGDSLHEHIANLAGSPAIKKGILQTVKVVDELVKVMGRHKPENIVIEMARENQTTQKGQKNSRERMKRIEEGIKELGSQILKEHPVENTQLQNEKLYLYYLQNGRDMYVDQELDINRLSDYDVDHIVPQSFLKDDSIDNKVLTRSDKARGKSDNVPSEEVVKKMKNYWRQLLNAKLITQRKFDNLTKAERGGLSELDKAGFIKRQLVETRQITKHVAQILDSRMNTKYDENDKLIREVKVITLKSKLVSDFRKDFQFYKVREINNYHHAHDAYLNAVVGTALIKKYPKLESEFVYGDYKVYDVRKMIAKSEQEIGKATAKYFFYSNIMNFFKTEITLANGEIRKRPLIETNGETGEIVWDKGRDFATVRKVLSMPQVNIVKKTEVQTGGFSKESILPKRNSDKLIARKKDWDPKKYGGFDSPTVAYSVLVVAKVEKGKSKKLKSVKELLGITIMERSSFEKNPIDFLEAKGYKEVKKDLIIKLPKYSLFELENGRKRMLASAGELQKGNELALPSKYVNFLYLASHYEKLKGSPEDNEQKQLFVEQHKHYLDEIIEQISEFSKRVILADANLDKVLSAYNKHRDKPIREQAENIIHLFTLTNLGAPAAFKYFDTTIDRKRYTSTKEVLDATLIHQSITGLYETRIDLSQLGGDGGGGSGGSGGSGGSGGSGGTLNIEDEHRLHETSKEPDVSLGSTWLSDFPQAWAETGGMGLAVRQAPLIIPLKATSTPVSIKQYPMSQEARLGIKPHIQRLLDQGILVPCQSPWNTPLLPVKKPGTNDYRPVQDLREVNKRVEDIHPTVPNPYNLLSGLPPSHQWYTVLDLKDAFFCLRLHPTSQPLFAFEWRDPEMGISGQLTWTRLPQGFKNSPTLFNEALHRDLADFRIQHPDLILLQYVDDLLLAATSELDCQQGTRALLQTLGNLGYRASAKKAQICQKQVKYLGYLLKEGQRWLTEARKETVMGQPTPKTPRQLREFLGKAGFCRLFIPGFAEMAAPLYPLTKPGTLFNWGPDQQKAYQEIKQALLTAPALGLPDLTKPFELFVDEKQGYAKGVLTQKLGPWRRPVAYLSKKLDPVAAGWPPCLRMVAAIAVLTKDAGKLTMGQPLVILAPHAVEALVKQPPDRWLSNARMTHYQALLLDTDRVQFGPVVALNPATLLPLPEEGLQHNCLDILAEAHGTRPDLTDQPLPDADHTWYTDGSSLLQEGQRKAGAAVTTETEVIWAKALPAGTSAQRAELIALTQALKMAEGKKLNVYTDSRYAFATAHIHGEIYRRRGWLTSEGKEIKNKDEILALLKALFLPKRLSIIHCPGHQKGHSAEARGNRMADQAARKAAITETPDTSTLLAGKRTADGSEFEKRTADGSEFESPKKKAKVE

SEQ ID NO: 2808 - protein, 2091 aa, synthetic construct
  source 1..2091: note = Description of Artificial Sequence: Synthetic polypeptide
MPAAKRVKLDGGDKKYSIGLDIGTNSVGWAVITDEYKVPSKKFKVLGNTDRHSIKKNLIGALLFDSGETAEATRLKRTARRRYTRRKNRICYLQEIFSNEMAKVDDSFFHRLEESFLVEEDKKHERHPIFGNIVDEVAYHEKYPTIYHLRKKLVDSTDKADLRLIYLALAHMIKFRGHFLIEGDLNPDNSDVDKLFIQLVQTYNQLFEENPINASGVDAKAILSARLSKSRRLENLIAQLPGEKKNGLFGNLIALSLGLTPNFKSNFDLAEDAKLQLSKDTYDDDLDNLLAQIGDQYADLFLAAKNLSDAILLSDILRVNTEITKAPLSASMIKRYDEHHQDLTLLKALVRQQLPEKYKEIFFDQSKNGYAGYIDGGASQEEFYKFIKPILEKMDGTEELLVKLNREDLLRKQRTFDNGSIPHQIHLGELHAILRRQEDFYPFLKDNREKIEKILTFRIPYYVGPLARGNSRFAWMTRKSEETITPWNFEEVVDKGASAQSFIERMTNFDKNLPNEKVLPKHSLLYEYFTVYNELTKVKYVTEGMRKPAFLSGEQKKAIVDLLFKTNRKVTVKQLKEDYFKKIECFDSVEISGVEDRFNASLGTYHDLLKIIKDKDFLDNEENEDILEDIVLTLTLFEDREMIEERLKTYAHLFDDKVMKQLKRRRYTGWGRLSRKLINGIRDKQSGKTILDFLKSDGFANRNFMQLIHDDSLTFKEDIQKAQVSGQGDSLHEHIANLAGSPAIKKGILQTVKVVDELVKVMGRHKPENIVIEMARENQTTQKGQKNSRERMKRIEEGIKELGSQILKEHPVENTQLQNEKLYLYYLQNGRDMYVDQELDINRLSDYDVDHIVPQSFLKDDSIDNKVLTRSDKARGKSDNVPSEEVVKKMKNYWRQLLNAKLITQRKFDNLTKAERGGLSELDKAGFIKRQLVETRQITKHVAQILDSRMNTKYDENDKLIREVKVITLKSKLVSDFRKDFQFYKVREINNYHHAHDAYLNAVVGTALIKKYPKLESEFVYGDYKVYDVRKMIAKSEQEIGKATAKYFFYSNIMNFFKTEITLANGEIRKRPLIETNGETGEIVWDKGRDFATVRKVLSMPQVNIVKKTEVQTGGFSKESILPKRNSDKLIARKKDWDPKKYGGFDSPTVAYSVLVVAKVEKGKSKKLKSVKELLGITIMERSSFEKNPIDFLEAKGYKEVKKDLIIKLPKYSLFELENGRKRMLASAGELQKGNELALPSKYVNFLYLASHYEKLKGSPEDNEQKQLFVEQHKHYLDEIIEQISEFSKRVILADANLDKVLSAYNKHRDKPIREQAENIIHLFTLTNLGAPAAFKYFDTTIDRKRYTSTKEVLDATLIHQSITGLYETRIDLSQLGGDGGGGSPAPGGTLNIEDEHRLHETSKEPDVSLGSTWLSDFPQAWAETGGMGLAVRQAPLIIPLKATSTPVSIKQYPMSQEARLGIKPHIQRLLDQGILVPCQSPWNTPLLPVKKPGTNDYRPVQDLREVNKRVEDIHPTVPNPYNLLSGLPPSHQWYTVLDLKDAFFCLRLHPTSQPLFAFEWRDPEMGISGQLTWTRLPQGFKNSPTLFNEALHRDLADFRIQHPDLILLQYVDDLLLAATSELDCQQGTRALLQTLGNLGYRASAKKAQICQKQVKYLGYLLKEGQRWLTEARKETVMGQPTPKTPRQLREFLGKAGFCRLFIPGFAEMAAPLYPLTKPGTLFNWGPDQQKAYQEIKQALLTAPALGLPDLTKPFELFVDEKQGYAKGVLTQKLGPWRRPVAYLSKKLDPVAAGWPPCLRMVAAIAVLTKDAGKLTMGQPLVILAPHAVEALVKQPPDRWLSNARMTHYQALLLDTDRVQFGPVVALNPATLLPLPEEGLQHNCLDILAEAHGTRPDLTDQPLPDADHTWYTDGSSLLQEGQRKAGAAVTTETEVIWAKALPAGTSAQRAELIALTQALKMAEGKKLNVYTDSRYAFATAHIHGEIYRRRGWLTSEGKEIKNKDEILALLKALFLPKRLSIIHCPGHQKGHSAEARGNRMADQAARKAAITETPDTSTLLAGKRTADGSEFEKRTADGSEFESPKKKAKVE

SEQ ID NO: 2809 - protein, 2094 aa, synthetic construct
  source 1..2094: note = Description of Artificial Sequence: Synthetic polypeptide
MPAAKRVKLDGGDKKYSIGLDIGTNSVGWAVITDEYKVPSKKFKVLGNTDRHSIKKNLIGALLFDSGETAEATRLKRTARRRYTRRKNRICYLQEIFSNEMAKVDDSFFHRLEESFLVEEDKKHERHPIFGNIVDEVAYHEKYPTIYHLRKKLVDSTDKADLRLIYLALAHMIKFRGHFLIEGDLNPDNSDVDKLFIQLVQTYNQLFEENPINASGVDAKAILSARLSKSRRLENLIAQLPGEKKNGLFGNLIALSLGLTPNFKSNFDLAEDAKLQLSKDTYDDDLDNLLAQIGDQYADLFLAAKNLSDAILLSDILRVNTEITKAPLSASMIKRYDEHHQDLTLLKALVRQQLPEKYKEIFFDQSKNGYAGYIDGGASQEEFYKFIKPILEKMDGTEELLVKLNREDLLRKQRTFDNGSIPHQIHLGELHAILRRQEDFYPFLKDNREKIEKILTFRIPYYVGPLARGNSRFAWMTRKSEETITPWNFEEVVDKGASAQSFIERMTNFDKNLPNEKVLPKHSLLYEYFTVYNELTKVKYVTEGMRKPAFLSGEQKKAIVDLLFKTNRKVTVKQLKEDYFKKIECFDSVEISGVEDRFNASLGTYHDLLKIIKDKDFLDNEENEDILEDIVLTLTLFEDREMIEERLKTYAHLFDDKVMKQLKRRRYTGWGRLSRKLINGIRDKQSGKTILDFLKSDGFANRNFMQLIHDDSLTFKEDIQKAQVSGQGDSLHEHIANLAGSPAIKKGILQTVKVVDELVKVMGRHKPENIVIEMARENQTTQKGQKNSRERMKRIEEGIKELGSQILKEHPVENTQLQNEKLYLYYLQNGRDMYVDQELDINRLSDYDVDHIVPQSFLKDDSIDNKVLTRSDKARGKSDNVPSEEVVKKMKNYWRQLLNAKLITQRKFDNLTKAERGGLSELDKAGFIKRQLVETRQITKHVAQILDSRMNTKYDENDKLIREVKVITLKSKLVSDFRKDFQFYKVREINNYHHAHDAYLNAVVGTALIKKYPKLESEFVYGDYKVYDVRKMIAKSEQEIGKATAKYFFYSNIMNFFKTEITLANGEIRKRPLIETNGETGEIVWDKGRDFATVRKVLSMPQVNIVKKTEVQTGGFSKESILPKRNSDKLIARKKDWDPKKYGGFDSPTVAYSVLVVAKVEKGKSKKLKSVKELLGITIMERSSFEKNPIDFLEAKGYKEVKKDLIIKLPKYSLFELENGRKRMLASAGELQKGNELALPSKYVNFLYLASHYEKLKGSPEDNEQKQLFVEQHKHYLDEIIEQISEFSKRVILADANLDKVLSAYNKHRDKPIREQAENIIHLFTLTNLGAPAAFKYFDTTIDRKRYTSTKEVLDATLIHQSITGLYETRIDLSQLGGDGGGGSGGSGGSGGTLNIEDEHRLHETSKEPDVSLGSTWLSDFPQAWAETGGMGLAVRQAPLIIPLKATSTPVSIKQYPMSQEARLGIKPHIQRLLDQGILVPCQSPWNTPLLPVKKPGTNDYRPVQDLREVNKRVEDIHPTVPNPYNLLSGLPPSHQWYTVLDLKDAFFCLRLHPTSQPLFAFEWRDPEMGISGQLTWTRLPQGFKNSPTLFNEALHRDLADFRIQHPDLILLQYVDDLLLAATSELDCQQGTRALLQTLGNLGYRASAKKAQICQKQVKYLGYLLKEGQRWLTEARKETVMGQPTPKTPRQLREFLGKAGFCRLFIPGFAEMAAPLYPLTKPGTLFNWGPDQQKAYQEIKQALLTAPALGLPDLTKPFELFVDEKQGYAKGVLTQKLGPWRRPVAYLSKKLDPVAAGWPPCLRMVAAIAVLTKDAGKLTMGQPLVILAPHAVEALVKQPPDRWLSNARMTHYQALLLDTDRVQFGPVVALNPATLLPLPEEGLQHNCLDILAEAHGTRPDLTDQPLPDADHTWYTDGSSLLQEGQRKAGAAVTTETEVIWAKALPAGTSAQRAELIALTQALKMAEGKKLNVYTDSRYAFATAHIHGEIYRRRGWLTSEGKEIKNKDEILALLKALFLPKRLSIIHCPGHQKGHSAEARGNRMADQAARKAAITETPDTSTLLAGKRTADGSEFEKRTADGSEFESPKKKAKVE

SEQ ID NO: 2810 - protein, 2096 aa, synthetic construct
  source 1..2096: note = Description of Artificial Sequence: Synthetic polypeptide
MPAAKRVKLDGGDKKYSIGLDIGTNSVGWAVITDEYKVPSKKFKVLGNTDRHSIKKNLIGALLFDSGETAEATRLKRTARRRYTRRKNRICYLQEIFSNEMAKVDDSFFHRLEESFLVEEDKKHERHPIFGNIVDEVAYHEKYPTIYHLRKKLVDSTDKADLRLIYLALAHMIKFRGHFLIEGDLNPDNSDVDKLFIQLVQTYNQLFEENPINASGVDAKAILSARLSKSRRLENLIAQLPGEKKNGLFGNLIALSLGLTPNFKSNFDLAEDAKLQLSKDTYDDDLDNLLAQIGDQYADLFLAAKNLSDAILLSDILRVNTEITKAPLSASMIKRYDEHHQDLTLLKALVRQQLPEKYKEIFFDQSKNGYAGYIDGGASQEEFYKFIKPILEKMDGTEELLVKLNREDLLRKQRTFDNGSIPHQIHLGELHAILRRQEDFYPFLKDNREKIEKILTFRIPYYVGPLARGNSRFAWMTRKSEETITPWNFEEVVDKGASAQSFIERMTNFDKNLPNEKVLPKHSLLYEYFTVYNELTKVKYVTEGMRKPAFLSGEQKKAIVDLLFKTNRKVTVKQLKEDYFKKIECFDSVEISGVEDRFNASLGTYHDLLKIIKDKDFLDNEENEDILEDIVLTLTLFEDREMIEERLKTYAHLFDDKVMKQLKRRRYTGWGRLSRKLINGIRDKQSGKTILDFLKSDGFANRNFMQLIHDDSLTFKEDIQKAQVSGQGDSLHEHIANLAGSPAIKKGILQTVKVVDELVKVMGRHKPENIVIEMARENQTTQKGQKNSRERMKRIEEGIKELGSQILKEHPVENTQLQNEKLYLYYLQNGRDMYVDQELDINRLSDYDVDHIVPQSFLKDDSIDNKVLTRSDKARGKSDNVPSEEVVKKMKNYWRQLLNAKLITQRKFDNLTKAERGGLSELDKAGFIKRQLVETRQITKHVAQILDSRMNTKYDENDKLIREVKVITLKSKLVSDFRKDFQFYKVREINNYHHAHDAYLNAVVGTALIKKYPKLESEFVYGDYKVYDVRKMIAKSEQEIGKATAKYFFYSNIMNFFKTEITLANGEIRKRPLIETNGETGEIVWDKGRDFATVRKVLSMPQVNIVKKTEVQTGGFSKESILPKRNSDKLIARKKDWDPKKYGGFDSPTVAYSVLVVAKVEKGKSKKLKSVKELLGITIMERSSFEKNPIDFLEAKGYKEVKKDLIIKLPKYSLFELENGRKRMLASAGELQKGNELALPSKYVNFLYLASHYEKLKGSPEDNEQKQLFVEQHKHYLDEIIEQISEFSKRVILADANLDKVLSAYNKHRDKPIREQAENIIHLFTLTNLGAPAAFKYFDTTIDRKRYTSTKEVLDATLIHQSITGLYETRIDLSQLGGDGGGSSGGGEAAAKGGTLNIEDEHRLHETSKEPDVSLGSTWLSDFPQAWAETGGMGLAVRQAPLIIPLKATSTPVSIKQYPMSQEARLGIKPHIQRLLDQGILVPCQSPWNTPLLPVKKPGTNDYRPVQDLREVNKRVEDIHPTVPNPYNLLSGLPPSHQWYTVLDLKDAFFCLRLHPTSQPLFAFEWRDPEMGISGQLTWTRLPQGFKNSPTLFNEALHRDLADFRIQHPDLILLQYVDDLLLAATSELDCQQGTRALLQTLGNLGYRASAKKAQICQKQVKYLGYLLKEGQRWLTEARKETVMGQPTPKTPRQLREFLGKAGFCRLFIPGFAEMAAPLYPLTKPGTLFNWGPDQQKAYQEIKQALLTAPALGLPDLTKPFELFVDEKQGYAKGVLTQKLGPWRRPVAYLSKKLDPVAAGWPPCLRMVAAIAVLTKDAGKLTMGQPLVILAPHAVEALVKQPPDRWLSNARMTHYQALLLDTDRVQFGPVVALNPATLLPLPEEGLQHNCLDILAEAHGTRPDLTDQPLPDADHTWYTDGSSLLQEGQRKAGAAVTTETEVIWAKALPAGTSAQRAELIALTQALKMAEGKKLNVYTDSRYAFATAHIHGEIYRRRGWLTSEGKEIKNKDEILALLKALFLPKRLSIIHCPGHQKGHSAEARGNRMADQAARKAAITETPDTSTLLAGKRTADGSEFEKRTADGSEFESPKKKAKVE

SEQ ID NO: 2811 - protein, 2094 aa, synthetic construct
  source 1..2094: note = Description of Artificial Sequence: Synthetic polypeptide
MPAAKRVKLDGGDKKYSIGLDIGTNSVGWAVITDEYKVPSKKFKVLGNTDRHSIKKNLIGALLFDSGETAEATRLKRTARRRYTRRKNRICYLQEIFSNEMAKVDDSFFHRLEESFLVEEDKKHERHPIFGNIVDEVAYHEKYPTIYHLRKKLVDSTDKADLRLIYLALAHMIKFRGHFLIEGDLNPDNSDVDKLFIQLVQTYNQLFEENPINASGVDAKAILSARLSKSRRLENLIAQLPGEKKNGLFGNLIALSLGLTPNFKSNFDLAEDAKLQLSKDTYDDDLDNLLAQIGDQYADLFLAAKNLSDAILLSDILRVNTEITKAPLSASMIKRYDEHHQDLTLLKALVRQQLPEKYKEIFFDQSKNGYAGYIDGGASQEEFYKFIKPILEKMDGTEELLVKLNREDLLRKQRTFDNGSIPHQIHLGELHAILRRQEDFYPFLKDNREKIEKILTFRIPYYVGPLARGNSRFAWMTRKSEETITPWNFEEVVDKGASAQSFIERMTNFDKNLPNEKVLPKHSLLYEYFTVYNELTKVKYVTEGMRKPAFLSGEQKKAIVDLLFKTNRKVTVKQLKEDYFKKIECFDSVEISGVEDRFNASLGTYHDLLKIIKDKDFLDNEENEDILEDIVLTLTLFEDREMIEERLKTYAHLFDDKVMKQLKRRRYTGWGRLSRKLINGIRDKQSGKTILDFLKSDGFANRNFMQLIHDDSLTFKEDIQKAQVSGQGDSLHEHIANLAGSPAIKKGILQTVKVVDELVKVMGRHKPENIVIEMARENQTTQKGQKNSRERMKRIEEGIKELGSQILKEHPVENTQLQNEKLYLYYLQNGRDMYVDQELDINRLSDYDVDHIVPQSFLKDDSIDNKVLTRSDKARGKSDNVPSEEVVKKMKNYWRQLLNAKLITQRKFDNLTKAERGGLSELDKAGFIKRQLVETRQITKHVAQILDSRMNTKYDENDKLIREVKVITLKSKLVSDFRKDFQFYKVREINNYHHAHDAYLNAVVGTALIKKYPKLESEFVYGDYKVYDVRKMIAKSEQEIGKATAKYFFYSNIMNFFKTEITLANGEIRKRPLIETNGETGEIVWDKGRDFATVRKVLSMPQVNIVKKTEVQTGGFSKESILPKRNSDKLIARKKDWDPKKYGGFDSPTVAYSVLVVAKVEKGKSKKLKSVKELLGITIMERSSFEKNPIDFLEAKGYKEVKKDLIIKLPKYSLFELENGRKRMLASAGELQKGNELALPSKYVNFLYLASHYEKLKGSPEDNEQKQLFVEQHKHYLDEIIEQISEFSKRVILADANLDKVLSAYNKHRDKPIREQAENIIHLFTLTNLGAPAAFKYFDTTIDRKRYTSTKEVLDATLIHQSITGLYETRIDLSQLGGDGGGSSGSSGSSGGTLNIEDEHRLHETSKEPDVSLGSTWLSDFPQAWAETGGMGLAVRQAPLIIPLKATSTPVSIKQYPMSQEARLGIKPHIQRLLDQGILVPCQSPWNTPLLPVKKPGTNDYRPVQDLREVNKRVEDIHPTVPNPYNLLSGLPPSHQWYTVLDLKDAFFCLRLHPTSQPLFAFEWRDPEMGISGQLTWTRLPQGFKNSPTLFNEALHRDLADFRIQHPDLILLQYVDDLLLAATSELDCQQGTRALLQTLGNLGYRASAKKAQICQKQVKYLGYLLKEGQRWLTEARKETVMGQPTPKTPRQLREFLGKAGFCRLFIPGFAEMAAPLYPLTKPGTLFNWGPDQQKAYQEIKQALLTAPALGLPDLTKPFELFVDEKQGYAKGVLTQKLGPWRRPVAYLSKKLDPVAAGWPPCLRMVAAIAVLTKDAGKLTMGQPLVILAPHAVEALVKQPPDRWLSNARMTHYQALLLDTDRVQFGPVVALNPATLLPLPEEGLQHNCLDILAEAHGTRPDLTDQPLPDADHTWYTDGSSLLQEGQRKAGAAVTTETEVIWAKALPAGTSAQRAELIALTQALKMAEGKKLNVYTDSRYAFATAHIHGEIYRRRGWLTSEGKEIKNKDEILALLKALFLPKRLSIIHCPGHQKGHSAEARGNRMADQAARKAAITETPDTSTLLAGKRTADGSEFEKRTADGSEFESPKKKAKVE

SEQ ID NO: 2812 - protein, 2088 aa, synthetic construct
  source 1..2088: note = Description of Artificial Sequence: Synthetic polypeptide
MPAAKRVKLDGGDKKYSIGLDIGTNSVGWAVITDEYKVPSKKFKVLGNTDRHSIKKNLIGALLFDSGETAEATRLKRTARRRYTRRKNRICYLQEIFSNEMAKVDDSFFHRLEESFLVEEDKKHERHPIFGNIVDEVAYHEKYPTIYHLRKKLVDSTDKADLRLIYLALAHMIKFRGHFLIEGDLNPDNSDVDKLFIQLVQTYNQLFEENPINASGVDAKAILSARLSKSRRLENLIAQLPGEKKNGLFGNLIALSLGLTPNFKSNFDLAEDAKLQLSKDTYDDDLDNLLAQIGDQYADLFLAAKNLSDAILLSDILRVNTEITKAPLSASMIKRYDEHHQDLTLLKALVRQQLPEKYKEIFFDQSKNGYAGYIDGGASQEEFYKFIKPILEKMDGTEELLVKLNREDLLRKQRTFDNGSIPHQIHLGELHAILRRQEDFYPFLKDNREKIEKILTFRIPYYVGPLARGNSRFAWMTRKSEETITPWNFEEVVDKGASAQSFIERMTNFDKNLPNEKVLPKHSLLYEYFTVYNELTKVKYVTEGMRKPAFLSGEQKKAIVDLLFKTNRKVTVKQLKEDYFKKIECFDSVEISGVEDRFNASLGTYHDLLKIIKDKDFLDNEENEDILEDIVLTLTLFEDREMIEERLKTYAHLFDDKVMKQLKRRRYTGWGRLSRKLINGIRDKQSGKTILDFLKSDGFANRNFMQLIHDDSLTFKEDIQKAQVSGQGDSLHEHIANLAGSPAIKKGILQTVKVVDELVKVMGRHKPENIVIEMARENQTTQKGQKNSRERMKRIEEGIKELGSQILKEHPVENTQLQNEKLYLYYLQNGRDMYVDQELDINRLSDYDVDHIVPQSFLKDDSIDNKVLTRSDKARGKSDNVPSEEVVKKMKNYWRQLLNAKLITQRKFDNLTKAERGGLSELDKAGFIKRQLVETRQITKHVAQILDSRMNTKYDENDKLIREVKVITLKSKLVSDFRKDFQFYKVREINNYHHAHDAYLNAVVGTALIKKYPKLESEFVYGDYKVYDVRKMIAKSEQEIGKATAKYFFYSNIMNFFKTEITLANGEIRKRPLIETNGETGEIVWDKGRDFATVRKVLSMPQVNIVKKTEVQTGGFSKESILPKRNSDKLIARKKDWDPKKYGGFDSPTVAYSVLVVAKVEKGKSKKLKSVKELLGITIMERSSFEKNPIDFLEAKGYKEVKKDLIIKLPKYSLFELENGRKRMLASAGELQKGNELALPSKYVNFLYLASHYEKLKGSPEDNEQKQLFVEQHKHYLDEIIEQISEFSKRVILADANLDKVLSAYNKHRDKPIREQAENIIHLFTLTNLGAPAAFKYFDTTIDRKRYTSTKEVLDATLIHQSITGLYETRIDLSQLGGDGGPAPGGTLNIEDEHRLHETSKEPDVSLGSTWLSDFPQAWAETGGMGLAVRQAPLIIPLKATSTPVSIKQYPMSQEARLGIKPHIQRLLDQGILVPCQSPWNTPLLPVKKPGTNDYRPVQDLREVNKRVEDIHPTVPNPYNLLSGLPPSHQWYTVLDLKDAFFCLRLHPTSQPLFAFEWRDPEMGISGQLTWTRLPQGFKNSPTLFNEALHRDLADFRIQHPDLILLQYVDDLLLAATSELDCQQGTRALLQTLGNLGYRASAKKAQICQKQVKYLGYLLKEGQRWLTEARKETVMGQPTPKTPRQLREFLGKAGFCRLFIPGFAEMAAPLYPLTKPGTLFNWGPDQQKAYQEIKQALLTAPALGLPDLTKPFELFVDEKQGYAKGVLTQKLGPWRRPVAYLSKKLDPVAAGWPPCLRMVAAIAVLTKDAGKLTMGQPLVILAPHAVEALVKQPPDRWLSNARMTHYQALLLDTDRVQFGPVVALNPATLLPLPEEGLQHNCLDILAEAHGTRPDLTDQPLPDADHTWYTDGSSLLQEGQRKAGAAVTTETEVIWAKALPAGTSAQRAELIALTQALKMAEGKKLNVYTDSRYAFATAHIHGEIYRRRGWLTSEGKEIKNKDEILALLKALFLPKRLSIIHCPGHQKGHSAEARGNRMADQAARKAAITETPDTSTLLAGKRTADGSEFEKRTADGSEFESPKKKAKVE

SEQ ID NO: 2813 - protein, 2115 aa, synthetic construct
  source 1..2115: note = Description of Artificial Sequence: Synthetic polypeptide
MPAAKRVKLDGGDKKYSIGLDIGTNSVGWAVITDEYKVPSKKFKVLGNTDRHSIKKNLIGALLFDSGETAEATRLKRTARRRYTRRKNRICYLQEIFSNEMAKVDDSFFHRLEESFLVEEDKKHERHPIFGNIVDEVAYHEKYPTIYHLRKKLVDSTDKADLRLIYLALAHMIKFRGHFLIEGDLNPDNSDVDKLFIQLVQTYNQLFEENPINASGVDAKAILSARLSKSRRLENLIAQLPGEKKNGLFGNLIALSLGLTPNFKSNFDLAEDAKLQLSKDTYDDDLDNLLAQIGDQYADLFLAAKNLSDAILLSDILRVNTEITKAPLSASMIKRYDEHHQDLTLLKALVRQQLPEKYKEIFFDQSKNGYAGYIDGGASQEEFYKFIKPILEKMDGTEELLVKLNREDLLRKQRTFDNGSIPHQIHLGELHAILRRQEDFYPFLKDNREKIEKILTFRIPYYVGPLARGNSRFAWMTRKSEETITPWNFEEVVDKGASAQSFIERMTNFDKNLPNEKVLPKHSLLYEYFTVYNELTKVKYVTEGMRKPAFLSGEQKKAIVDLLFKTNRKVTVKQLKEDYFKKIECFDSVEISGVEDRFNASLGTYHDLLKIIKDKDFLDNEENEDILEDIVLTLTLFEDREMIEERLKTYAHLFDDKVMKQLKRRRYTGWGRLSRKLINGIRDKQSGKTILDFLKSDGFANRNFMQLIHDDSLTFKEDIQKAQVSGQGDSLHEHIANLAGSPAIKKGILQTVKVVDELVKVMGRHKPENIVIEMARENQTTQKGQKNSRERMKRIEEGIKELGSQILKEHPVENTQLQNEKLYLYYLQNGRDMYVDQELDINRLSDYDVDHIVPQSFLKDDSIDNKVLTRSDKARGKSDNVPSEEVVKKMKNYWRQLLNAKLITQRKFDNLTKAERGGLSELDKAGFIKRQLVETRQITKHVAQILDSRMNTKYDENDKLIREVKVITLKSKLVSDFRKDFQFYKVREINNYHHAHDAYLNAVVGTALIKKYPKLESEFVYGDYKVYDVRKMIAKSEQEIGKATAKYFFYSNIMNFFKTEITLANGEIRKRPLIETNGETGEIVWDKGRDFATVRKVLSMPQVNIVKKTEVQTGGFSKESILPKRNSDKLIARKKDWDPKKYGGFDSPTVAYSVLVVAKVEKGKSKKLKSVKELLGITIMERSSFEKNPIDFLEAKGYKEVKKDLIIKLPKYSLFELENGRKRMLASAGELQKGNELALPSKYVNFLYLASHYEKLKGSPEDNEQKQLFVEQHKHYLDEIIEQISEFSKRVILADANLDKVLSAYNKHRDKPIREQAENIIHLFTLTNLGAPAAFKYFDTTIDRKRYTSTKEVLDATLIHQSITGLYETRIDLSQLGGDGGEAAAKEAAAKEAAAKEAAAKEAAAKEAAAKGGTLNIEDEHRLHETSKEPDVSLGSTWLSDFPQAWAETGGMGLAVRQAPLIIPLKATSTPVSIKQYPMSQEARLGIKPHIQRLLDQGILVPCQSPWNTPLLPVKKPGTNDYRPVQDLREVNKRVEDIHPTVPNPYNLLSGLPPSHQWYTVLDLKDAFFCLRLHPTSQPLFAFEWRDPEMGISGQLTWTRLPQGFKNSPTLFNEALHRDLADFRIQHPDLILLQYVDDLLLAATSELDCQQGTRALLQTLGNLGYRASAKKAQICQKQVKYLGYLLKEGQRWLTEARKETVMGQPTPKTPRQLREFLGKAGFCRLFIPGFAEMAAPLYPLTKPGTLFNWGPDQQKAYQEIKQALLTAPALGLPDLTKPFELFVDEKQGYAKGVLTQKLGPWRRPVAYLSKKLDPVAAGWPPCLRMVAAIAVLTKDAGKLTMGQPLVILAPHAVEALVKQPPDRWLSNARMTHYQALLLDTDRVQFGPVVALNPATLLPLPEEGLQHNCLDILAEAHGTRPDLTDQPLPDADHTWYTDGSSLLQEGQRKAGAAVTTETEVIWAKALPAGTSAQRAELIALTQALKMAEGKKLNVYTDSRYAFATAHIHGEIYRRRGWLTSEGKEIKNKDEILALLKALFLPKRLSIIHCPGHQKGHSAEARGNRMADQAARKAAITETPDTSTLLAGKRTADGSEFEKRTADGSEFESPKKKAKVE

SEQ ID NO: 2814 - protein, 2097 aa, synthetic construct
  source 1..2097: note = Description of Artificial Sequence: Synthetic polypeptide
MPAAKRVKLDGGDKKYSIGLDIGTNSVGWAVITDEYKVPSKKFKVLGNTDRHSIKKNLIGALLFDSGETAEATRLKRTARRRYTRRKNRICYLQEIFSNEMAKVDDSFFHRLEESFLVEEDKKHERHPIFGNIVDEVAYHEKYPTIYHLRKKLVDSTDKADLRLIYLALAHMIKFRGHFLIEGDLNPDNSDVDKLFIQLVQTYNQLFEENPINASGVDAKAILSARLSKSRRLENLIAQLPGEKKNGLFGNLIALSLGLTPNFKSNFDLAEDAKLQLSKDTYDDDLDNLLAQIGDQYADLFLAAKNLSDAILLSDILRVNTEITKAPLSASMIKRYDEHHQDLTLLKALVRQQLPEKYKEIFFDQSKNGYAGYIDGGASQEEFYKFIKPILEKMDGTEELLVKLNREDLLRKQRTFDNGSIPHQIHLGELHAILRRQEDFYPFLKDNREKIEKILTFRIPYYVGPLARGNSRFAWMTRKSEETITPWNFEEVVDKGASAQSFIERMTNFDKNLPNEKVLPKHSLLYEYFTVYNELTKVKYVTEGMRKPAFLSGEQKKAIVDLLFKTNRKVTVKQLKEDYFKKIECFDSVEISGVEDRFNASLGTYHDLLKIIKDKDFLDNEENEDILEDIVLTLTLFEDREMIEERLKTYAHLFDDKVMKQLKRRRYTGWGRLSRKLINGIRDKQSGKTILDFLKSDGFANRNFMQLIHDDSLTFKEDIQKAQVSGQGDSLHEHIANLAGSPAIKKGILQTVKVVDELVKVMGRHKPENIVIEMARENQTTQKGQKNSRERMKRIEEGIKELGSQILKEHPVENTQLQNEKLYLYYLQNGRDMYVDQELDINRLSDYDVDHIVPQSFLKDDSIDNKVLTRSDKARGKSDNVPSEEVVKKMKNYWRQLLNAKLITQRKFDNLTKAERGGLSELDKAGFIKRQLVETRQITKHVAQILDSRMNTKYDENDKLIREVKVITLKSKLVSDFRKDFQFYKVREINNYHHAHDAYLNAVVGTALIKKYPKLESEFVYGDYKVYDVRKMIAKSEQEIGKATAKYFFYSNIMNFFKTEITLANGEIRKRPLIETNGETGEIVWDKGRDFATVRKVLSMPQVNIVKKTEVQTGGFSKESILPKRNSDKLIARKKDWDPKKYGGFDSPTVAYSVLVVAKVEKGKSKKLKSVKELLGITIMERSSFEKNPIDFLEAKGYKEVKKDLIIKLPKYSLFELENGRKRMLASAGELQKGNELALPSKYVNFLYLASHYEKLKGSPEDNEQKQLFVEQHKHYLDEIIEQISEFSKRVILADANLDKVLSAYNKHRDKPIREQAENIIHLFTLTNLGAPAAFKYFDTTIDRKRYTSTKEVLDATLIHQSITGLYETRIDLSQLGGDGGGSAGSAAGSGEFGGTLNIEDEHRLHETSKEPDVSLGSTWLSDFPQAWAETGGMGLAVRQAPLIIPLKATSTPVSIKQYPMSQEARLGIKPHIQRLLDQGILVPCQSPWNTPLLPVKKPGTNDYRPVQDLREVNKRVEDIHPTVPNPYNLLSGLPPSHQWYTVLDLKDAFFCLRLHPTSQPLFAFEWRDPEMGISGQLTWTRLPQGFKNSPTLFNEALHRDLADFRIQHPDLILLQYVDDLLLAATSELDCQQGTRALLQTLGNLGYRASAKKAQICQKQVKYLGYLLKEGQRWLTEARKETVMGQPTPKTPRQLREFLGKAGFCRLFIPGFAEMAAPLYPLTKPGTLFNWGPDQQKAYQEIKQALLTAPALGLPDLTKPFELFVDEKQGYAKGVLTQKLGPWRRPVAYLSKKLDPVAAGWPPCLRMVAAIAVLTKDAGKLTMGQPLVILAPHAVEALVKQPPDRWLSNARMTHYQALLLDTDRVQFGPVVALNPATLLPLPEEGLQHNCLDILAEAHGTRPDLTDQPLPDADHTWYTDGSSLLQEGQRKAGAAVTTETEVIWAKALPAGTSAQRAELIALTQALKMAEGKKLNVYTDSRYAFATAHIHGEIYRRRGWLTSEGKEIKNKDEILALLKALFLPKRLSIIHCPGHQKGHSAEARGNRMADQAARKAAITETPDTSTLLAGKRTADGSEFEKRTADGSEFESPKKKAKVE

SEQ ID NO: 2815 - protein, 2096 aa, synthetic construct
  source 1..2096: note = Description of Artificial Sequence: Synthetic polypeptide
MPAAKRVKLDGGDKKYSIGLDIGTNSVGWAVITDEYKVPSKKFKVLGNTDRHSIKKNLIGALLFDSGETAEATRLKRTARRRYTRRKNRICYLQEIFSNEMAKVDDSFFHRLEESFLVEEDKKHERHPIFGNIVDEVAYHEKYPTIYHLRKKLVDSTDKADLRLIYLALAHMIKFRGHFLIEGDLNPDNSDVDKLFIQLVQTYNQLFEENPINASGVDAKAILSARLSKSRRLENLIAQLPGEKKNGLFGNLIALSLGLTPNFKSNFDLAEDAKLQLSKDTYDDDLDNLLAQIGDQYADLFLAAKNLSDAILLSDILRVNTEITKAPLSASMIKRYDEHHQDLTLLKALVRQQLPEKYKEIFFDQSKNGYAGYIDGGASQEEFYKFIKPILEKMDGTEELLVKLNREDLLRKQRTFDNGSIPHQIHLGELHAILRRQEDFYPFLKDNREKIEKILTFRIPYYVGPLARGNSRFAWMTRKSEETITPWNFEEVVDKGASAQSFIERMTNFDKNLPNEKVLPKHSLLYEYFTVYNELTKVKYVTEGMRKPAFLSGEQKKAIVDLLFKTNRKVTVKQLKEDYFKKIECFDSVEISGVEDRFNASLGTYHDLLKIIKDKDFLDNEENEDILEDIVLTLTLFEDREMIEERLKTYAHLFDDKVMKQLKRRRYTGWGRLSRKLINGIRDKQSGKTILDFLKSDGFANRNFMQLIHDDSLTFKEDIQKAQVSGQGDSLHEHIANLAGSPAIKKGILQTVKVVDELVKVMGRHKPENIVIEMARENQTTQKGQKNSRERMKRIEEGIKELGSQILKEHPVENTQLQNEKLYLYYLQNGRDMYVDQELDINRLSDYDVDHIVPQSFLKDDSIDNKVLTRSDKARGKSDNVPSEEVVKKMKNYWRQLLNAKLITQRKFDNLTKAERGGLSELDKAGFIKRQLVETRQITKHVAQILDSRMNTKYDENDKLIREVKVITLKSKLVSDFRKDFQFYKVREINNYHHAHDAYLNAVVGTALIKKYPKLESEFVYGDYKVYDVRKMIAKSEQEIGKATAKYFFYSNIMNFFKTEITLANGEIRKRPLIETNGETGEIVWDKGRDFATVRKVLSMPQVNIVKKTEVQTGGFSKESILPKRNSDKLIARKKDWDPKKYGGFDSPTVAYSVLVVAKVEKGKSKKLKSVKELLGITIMERSSFEKNPIDFLEAKGYKEVKKDLIIKLPKYSLFELENGRKRMLASAGELQKGNELALPSKYVNFLYLASHYEKLKGSPEDNEQKQLFVEQHKHYLDEIIEQISEFSKRVILADANLDKVLSAYNKHRDKPIREQAENIIHLFTLTNLGAPAAFKYFDTTIDRKRYTSTKEVLDATLIHQSITGLYETRIDLSQLGGDGGEAAAKGGGGGSGGTLNIEDEHRLHETSKEPDVSLGSTWLSDFPQAWAETGGMGLAVRQAPLIIPLKATSTPVSIKQYPMSQEARLGIKPHIQRLLDQGILVPCQSPWNTPLLPVKKPGTNDYRPVQDLREVNKRVEDIHPTVPNPYNLLSGLPPSHQWYTVLDLKDAFFCLRLHPTSQPLFAFEWRDPEMGISGQLTWTRLPQGFKNSPTLFNEALHRDLADFRIQHPDLILLQYVDDLLLAATSELDCQQGTRALLQTLGNLGYRASAKKAQICQKQVKYLGYLLKEGQRWLTEARKETVMGQPTPKTPRQLREFLGKAGFCRLFIPGFAEMAAPLYPLTKPGTLFNWGPDQQKAYQEIKQALLTAPALGLPDLTKPFELFVDEKQGYAKGVLTQKLGPWRRPVAYLSKKLDPVAAGWPPCLRMVAAIAVLTKDAGKLTMGQPLVILAPHAVEALVKQPPDRWLSNARMTHYQALLLDTDRVQFGPVVALNPATLLPLPEEGLQHNCLDILAEAHGTRPDLTDQPLPDADHTWYTDGSSLLQEGQRKAGAAVTTETEVIWAKALPAGTSAQRAELIALTQALKMAEGKKLNVYTDSRYAFATAHIHGEIYRRRGWLTSEGKEIKNKDEILALLKALFLPKRLSIIHCPGHQKGHSAEARGNRMADQAARKAAITETPDTSTLLAGKRTADGSEFEKRTADGSEFESPKKKAKVE

SEQ ID NO: 2816 - protein, 2103 aa, synthetic construct
  source 1..2103: note = Description of Artificial Sequence: Synthetic polypeptide
MPAAKRVKLDGGDKKYSIGLDIGTNSVGWAVITDEYKVPSKKFKVLGNTDRHSIKKNLIGALLFDSGETAEATRLKRTARRRYTRRKNRICYLQEIFSNEMAKVDDSFFHRLEESFLVEEDKKHERHPIFGNIVDEVAYHEKYPTIYHLRKKLVDSTDKADLRLIYLALAHMIKFRGHFLIEGDLNPDNSDVDKLFIQLVQTYNQLFEENPINASGVDAKAILSARLSKSRRLENLIAQLPGEKKNGLFGNLIALSLGLTPNFKSNFDLAEDAKLQLSKDTYDDDLDNLLAQIGDQYADLFLAAKNLSDAILLSDILRVNTEITKAPLSASMIKRYDEHHQDLTLLKALVRQQLPEKYKEIFFDQSKNGYAGYIDGGASQEEFYKFIKPILEKMDGTEELLVKLNREDLLRKQRTFDNGSIPHQIHLGELHAILRRQEDFYPFLKDNREKIEKILTFRIPYYVGPLARGNSRFAWMTRKSEETITPWNFEEVVDKGASAQSFIERMTNFDKNLPNEKVLPKHSLLYEYFTVYNELTKVKYVTEGMRKPAFLSGEQKKAIVDLLFKTNRKVTVKQLKEDYFKKIECFDSVEISGVEDRFNASLGTYHDLLKIIKDKDFLDNEENEDILEDIVLTLTLFEDREMIEERLKTYAHLFDDKVMKQLKRRRYTGWGRLSRKLINGIRDKQSGKTILDFLKSDGFANRNFMQLIHDDSLTFKEDIQKAQVSGQGDSLHEHIANLAGSPAIKKGILQTVKVVDELVKVMGRHKPENIVIEMARENQTTQKGQKNSRERMKRIEEGIKELGSQILKEHPVENTQLQNEKLYLYYLQNGRDMYVDQELDINRLSDYDVDHIVPQSFLKDDSIDNKVLTRSDKARGKSDNVPSEEVVKKMKNYWRQLLNAKLITQRKFDNLTKAERGGLSELDKAGFIKRQLVETRQITKHVAQILDSRMNTKYDENDKLIREVKVITLKSKLVSDFRKDFQFYKVREINNYHHAHDAYLNAVVGTALIKKYPKLESEFVYGDYKVYDVRKMIAKSEQEIGKATAKYFFYSNIMNFFKTEITLANGEIRKRPLIETNGETGEIVWDKGRDFATVRKVLSMPQVNIVKKTEVQTGGFSKESILPKRNSDKLIARKKDWDPKKYGGFDSPTVAYSVLVVAKVEKGKSKKLKSVKELLGITIMERSSFEKNPIDFLEAKGYKEVKKDLIIKLPKYSLFELENGRKRMLASAGELQKGNELALPSKYVNFLYLASHYEKLKGSPEDNEQKQLFVEQHKHYLDEIIEQISEFSKRVILADANLDKVLSAYNKHRDKPIREQAENIIHLFTLTNLGAPAAFKYFDTTIDRKRYTSTKEVLDATLIHQSITGLYETRIDLSQLGGDGGGSSGSSGSSGSSGSSGSSGGTLNIEDEHRLHETSKEPDVSLGSTWLSDFPQAWAETGGMGLAVRQAPLIIPLKATSTPVSIKQYPMSQEARLGIKPHIQRLLDQGILVPCQSPWNTPLLPVKKPGTNDYRPVQDLREVNKRVEDIHPTVPNPYNLLSGLPPSHQWYTVLDLKDAFFCLRLHPTSQPLFAFEWRDPEMGISGQLTWTRLPQGFKNSPTLFNEALHRDLADFRIQHPDLILLQYVDDLLLAATSELDCQQGTRALLQTLGNLGYRASAKKAQICQKQVKYLGYLLKEGQRWLTEARKETVMGQPTPKTPRQLREFLGKAGFCRLFIPGFAEMAAPLYPLTKPGTLFNWGPDQQKAYQEIKQALLTAPALGLPDLTKPFELFVDEKQGYAKGVLTQKLGPWRRPVAYLSKKLDPVAAGWPPCLRMVAAIAVLTKDAGKLTMGQPLVILAPHAVEALVKQPPDRWLSNARMTHYQALLLDTDRVQFGPVVALNPATLLPLPEEGLQHNCLDILAEAHGTRPDLTDQPLPDADHTWYTDGSSLLQEGQRKAGAAVTTETEVIWAKALPAGTSAQRAELIALTQALKMAEGKKLNVYTDSRYAFATAHIHGEIYRRRGWLTSEGKEIKNKDEILALLKALFLPKRLSIIHCPGHQKGHSAEARGNRMADQAARKAAITETPDTSTLLAGKRTADGSEFEKRTADGSEFESPKKKAKVE

SEQ ID NO: 2817 - protein, 2096 aa, synthetic construct
  source 1..2096: note = Description of Artificial Sequence: Synthetic polypeptide
MPAAKRVKLDGGDKKYSIGLDIGTNSVGWAVITDEYKVPSKKFKVLGNTDRHSIKKNLIGALLFDSGETAEATRLKRTARRRYTRRKNRICYLQEIFSNEMAKVDDSFFHRLEESFLVEEDKKHERHPIFGNIVDEVAYHEKYPTIYHLRKKLVDSTDKADLRLIYLALAHMIKFRGHFLIEGDLNPDNSDVDKLFIQLVQTYNQLFEENPINASGVDAKAILSARLSKSRRLENLIAQLPGEKKNGLFGNLIALSLGLTPNFKSNFDLAEDAKLQLSKDTYDDDLDNLLAQIGDQYADLFLAAKNLSDAILLSDILRVNTEITKAPLSASMIKRYDEHHQDLTLLKALVRQQLPEKYKEIFFDQSKNGYAGYIDGGASQEEFYKFIKPILEKMDGTEELLVKLNREDLLRKQRTFDNGSIPHQIHLGELHAILRRQEDFYPFLKDNREKIEKILTFRIPYYVGPLARGNSRFAWMTRKSEETITPWNFEEVVDKGASAQSFIERMTNFDKNLPNEKVLPKHSLLYEYFTVYNELTKVKYVTEGMRKPAFLSGEQKKAIVDLLFKTNRKVTVKQLKEDYFKKIECFDSVEISGVEDRFNASLGTYHDLLKIIKDKDFLDNEENEDILEDIVLTLTLFEDREMIEERLKTYAHLFDDKVMKQLKRRRYTGWGRLSRKLINGIRDKQSGKTILDFLKSDGFANRNFMQLIHDDSLTFKEDIQKAQVSGQGDSLHEHIANLAGSPAIKKGILQTVKVVDELVKVMGRHKPENIVIEMARENQTTQKGQKNSRERMKRIEEGIKELGSQILKEHPVENTQLQNEKLYLYYLQNGRDMYVDQELDINRLSDYDVDHIVPQSFLKDDSIDNKVLTRSDKARGKSDNVPSEEVVKKMKNYWRQLLNAKLITQRKFDNLTKAERGGLSELDKAGFIKRQLVETRQITKHVAQILDSRMNTKYDENDKLIREVKVITLKSKLVSDFRKDFQFYKVREINNYHHAHDAYLNAVVGTALIKKYPKLESEFVYGDYKVYDVRKMIAKSEQEIGKATAKYFFYSNIMNFFKTEITLANGEIRKRPLIETNGETGEIVWDKGRDFATVRKVLSMPQVNIVKKTEVQTGGFSKESILPKRNSDKLIARKKDWDPKKYGGFDSPTVAYSVLVVAKVEKGKSKKLKSVKELLGITIMERSSFEKNPIDFLEAKGYKEVKKDLIIKLPKYSLFELENGRKRMLASAGELQKGNELALPSKYVNFLYLASHYEKLKGSPEDNEQKQLFVEQHKHYLDEIIEQISEFSKRVILADANLDKVLSAYNKHRDKPIREQAENIIHLFTLTNLGAPAAFKYFDTTIDRKRYTSTKEVLDATLIHQSITGLYETRIDLSQLGGDGGEAAAKGGSGSSGGTLNIEDEHRLHETSKEPDVSLGSTWLSDFPQAWAETGGMGLAVRQAPLIIPLKATSTPVSIKQYPMSQEARLGIKPHIQRLLDQGILVPCQSPWNTPLLPVKKPGTNDYRPVQDLREVNKRVEDIHPTVPNPYNLLSGLPPSHQWYTVLDLKDAFFCLRLHPTSQPLFAFEWRDPEMGISGQLTWTRLPQGFKNSPTLFNEALHRDLADFRIQHPDLILLQYVDDLLLAATSELDCQQGTRALLQTLGNLGYRASAKKAQICQKQVKYLGYLLKEGQRWLTEARKETVMGQPTPKTPRQLREFLGKAGFCRLFIPGFAEMAAPLYPLTKPGTLFNWGPDQQKAYQEIKQALLTAPALGLPDLTKPFELFVDEKQGYAKGVLTQKLGPWRRPVAYLSKKLDPVAAGWPPCLRMVAAIAVLTKDAGKLTMGQPLVILAPHAVEALVKQPPDRWLSNARMTHYQALLLDTDRVQFGPVVALNPATLLPLPEEGLQHNCLDILAEAHGTRPDLTDQPLPDADHTWYTDGSSLLQEGQRKAGAAVTTETEVIWAKALPAGTSAQRAELIALTQALKMAEGKKLNVYTDSRYAFATAHIHGEIYRRRGWLTSEGKEIKNKDEILALLKALFLPKRLSIIHCPGHQKGHSAEARGNRMADQAARKAAITETPDTSTLLAGKRTADGSEFEKRTADGSEFESPKKKAKVE

SEQ ID NO: 2818 - protein, 2094 aa, synthetic construct
  source 1..2094: note = Description of Artificial Sequence: Synthetic polypeptide
MPAAKRVKLDGGDKKYSIGLDIGTNSVGWAVITDEYKVPSKKFKVLGNTDRHSIKKNLIGALLFDSGETAEATRLKRTARRRYTRRKNRICYLQEIFSNEMAKVDDSFFHRLEESFLVEEDKKHERHPIFGNIVDEVAYHEKYPTIYHLRKKLVDSTDKADLRLIYLALAHMIKFRGHFLIEGDLNPDNSDVDKLFIQLVQTYNQLFEENPINASGVDAKAILSARLSKSRRLENLIAQLPGEKKNGLFGNLIALSLGLTPNFKSNFDLAEDAKLQLSKDTYDDDLDNLLAQIGDQYADLFLAAKNLSDAILLSDILRVNTEITKAPLSASMIKRYDEHHQDLTLLKALVRQQLPEKYKEIFFDQSKNGYAGYIDGGASQEEFYKFIKPILEKMDGTEELLVKLNREDLLRKQRTFDNGSIPHQIHLGELHAILRRQEDFYPFLKDNREKIEKILTFRIPYYVGPLARGNSRFAWMTRKSEETITPWNFEEVVDKGASAQSFIERMTNFDKNLPNEKVLPKHSLLYEYFTVYNELTKVKYVTEGMRKPAFLSGEQKKAIVDLLFKTNRKVTVKQLKEDYFKKIECFDSVEISGVEDRFNASLGTYHDLLKIIKDKDFLDNEENEDILEDIVLTLTLFEDREMIEERLKTYAHLFDDKVMKQLKRRRYTGWGRLSRKLINGIRDKQSGKTILDFLKSDGFANRNFMQLIHDDSLTFKEDIQKAQVSGQGDSLHEHIANLAGSPAIKKGILQTVKVVDELVKVMGRHKPENIVIEMARENQTTQKGQKNSRERMKRIEEGIKELGSQILKEHPVENTQLQNEKLYLYYLQNGRDMYVDQELDINRLSDYDVDHIVPQSFLKDDSIDNKVLTRSDKARGKSDNVPSEEVVKKMKNYWRQLLNAKLITQRKFDNLTKAERGGLSELDKAGFIKRQLVETRQITKHVAQILDSRMNTKYDENDKLIREVKVITLKSKLVSDFRKDFQFYKVREINNYHHAHDAYLNAVVGTALIKKYPKLESEFVYGDYKVYDVRKMIAKSEQEIGKATAKYFFYSNIMNFFKTEITLANGEIRKRPLIETNGETGEIVWDKGRDFATVRKVLSMPQVNIVKKTEVQTGGFSKESILPKRNSDKLIARKKDWDPKKYGGFDSPTVAYSVLVVAKVEKGKSKKLKSVKELLGITIMERSSFEKNPIDFLEAKGYKEVKKDLIIKLPKYSLFELENGRKRMLASAGELQKGNELALPSKYVNFLYLASHYEKLKGSPEDNEQKQLFVEQHKHYLDEIIEQISEFSKRVILADANLDKVLSAYNKHRDKPIREQAENIIHLFTLTNLGAPAAFKYFDTTIDRKRYTSTKEVLDATLIHQSITGLYETRIDLSQLGGDGGGGSGSSGGGGGTLNIEDEHRLHETSKEPDVSLGSTWLSDFPQAWAETGGMGLAVRQAPLIIPLKATSTPVSIKQYPMSQEARLGIKPHIQRLLDQGILVPCQSPWNTPLLPVKKPGTNDYRPVQDLREVNKRVEDIHPTVPNPYNLLSGLPPSHQWYTVLDLKDAFFCLRLHPTSQPLFAFEWRDPEMGISGQLTWTRLPQGFKNSPTLFNEALHRDLADFRIQHPDLILLQYVDDLLLAATSELDCQQGTRALLQTLGNLGYRASAKKAQICQKQVKYLGYLLKEGQRWLTEARKETVMGQPTPKTPRQLREFLGKAGFCRLFIPGFAEMAAPLYPLTKPGTLFNWGPDQQKAYQEIKQALLTAPALGLPDLTKPFELFVDEKQGYAKGVLTQKLGPWRRPVAYLSKKLDPVAAGWPPCLRMVAAIAVLTKDAGKLTMGQPLVILAPHAVEALVKQPPDRWLSNARMTHYQALLLDTDRVQFGPVVALNPATLLPLPEEGLQHNCLDILAEAHGTRPDLTDQPLPDADHTWYTDGSSLLQEGQRKAGAAVTTETEVIWAKALPAGTSAQRAELIALTQALKMAEGKKLNVYTDSRYAFATAHIHGEIYRRRGWLTSEGKEIKNKDEILALLKALFLPKRLSIIHCPGHQKGHSAEARGNRMADQAARKAAITETPDTSTLLAGKRTADGSEFEKRTADGSEFESPKKKAKVE

SEQ ID NO: 2819 - protein, 2100 aa, synthetic construct
  source 1..2100: note = Description of Artificial Sequence: Synthetic polypeptide
MPAAKRVKLDGGDKKYSIGLDIGTNSVGWAVITDEYKVPSKKFKVLGNTDRHSIKKNLIGALLFDSGETAEATRLKRTARRRYTRRKNRICYLQEIFSNEMAKVDDSFFHRLEESFLVEEDKKHERHPIFGNIVDEVAYHEKYPTIYHLRKKLVDSTDKADLRLIYLALAHMIKFRGHFLIEGDLNPDNSDVDKLFIQLVQTYNQLFEENPINASGVDAKAILSARLSKSRRLENLIAQLPGEKKNGLFGNLIALSLGLTPNFKSNFDLAEDAKLQLSKDTYDDDLDNLLAQIGDQYADLFLAAKNLSDAILLSDILRVNTEITKAPLSASMIKRYDEHHQDLTLLKALVRQQLPEKYKEIFFDQSKNGYAGYIDGGASQEEFYKFIKPILEKMDGTEELLVKLNREDLLRKQRTFDNGSIPHQIHLGELHAILRRQEDFYPFLKDNREKIEKILTFRIPYYVGPLARGNSRFAWMTRKSEETITPWNFEEVVDKGASAQSFIERMTNFDKNLPNEKVLPKHSLLYEYFTVYNELTKVKYVTEGMRKPAFLSGEQKKAIVDLLFKTNRKVTVKQLKEDYFKKIECFDSVEISGVEDRFNASLGTYHDLLKIIKDKDFLDNEENEDILEDIVLTLTLFEDREMIEERLKTYAHLFDDKVMKQLKRRRYTGWGRLSRKLINGIRDKQSGKTILDFLKSDGFANRNFMQLIHDDSLTFKEDIQKAQVSGQGDSLHEHIANLAGSPAIKKGILQTVKVVDELVKVMGRHKPENIVIEMARENQTTQKGQKNSRERMKRIEEGIKELGSQILKEHPVENTQLQNEKLYLYYLQNGRDMYVDQELDINRLSDYDVDHIVPQSFLKDDSIDNKVLTRSDKARGKSDNVPSEEVVKKMKNYWRQLLNAKLITQRKFDNLTKAERGGLSELDKAGFIKRQLVETRQITKHVAQILDSRMNTKYDENDKLIREVKVITLKSKLVSDFRKDFQFYKVREINNYHHAHDAYLNAVVGTALIKKYPKLESEFVYGDYKVYDVRKMIAKSEQEIGKATAKYFFYSNIMNFFKTEITLANGEIRKRPLIETNGETGEIVWDKGRDFATVRKVLSMPQVNIVKKTEVQTGGFSKESILPKRNSDKLIARKKDWDPKKYGGFDSPTVAYSVLVVAKVEKGKSKKLKSVKELLGITIMERSSFEKNPIDFLEAKGYKEVKKDLIIKLPKYSLFELENGRKRMLASAGELQKGNELALPSKYVNFLYLASHYEKLKGSPEDNEQKQLFVEQHKHYLDEIIEQISEFSKRVILADANLDKVLSAYNKHRDKPIREQAENIIHLFTLTNLGAPAAFKYFDTTIDRKRYTSTKEVLDATLIHQSITGLYETRIDLSQLGGDGGGGGGSGGGGSGGGGSGGTLNIEDEHRLHETSKEPDVSLGSTWLSDFPQAWAETGGMGLAVRQAPLIIPLKATSTPVSIKQYPMSQEARLGIKPHIQRLLDQGILVPCQSPWNTPLLPVKKPGTNDYRPVQDLREVNKRVEDIHPTVPNPYNLLSGLPPSHQWYTVLDLKDAFFCLRLHPTSQPLFAFEWRDPEMGISGQLTWTRLPQGFKNSPTLFNEALHRDLADFRIQHPDLILLQYVDDLLLAATSELDCQQGTRALLQTLGNLGYRASAKKAQICQKQVKYLGYLLKEGQRWLTEARKETVMGQPTPKTPRQLREFLGKAGFCRLFIPGFAEMAAPLYPLTKPGTLFNWGPDQQKAYQEIKQALLTAPALGLPDLTKPFELFVDEKQGYAKGVLTQKLGPWRRPVAYLSKKLDPVAAGWPPCLRMVAAIAVLTKDAGKLTMGQPLVILAPHAVEALVKQPPDRWLSNARMTHYQALLLDTDRVQFGPVVALNPATLLPLPEEGLQHNCLDILAEAHGTRPDLTDQPLPDADHTWYTDGSSLLQEGQRKAGAAVTTETEVIWAKALPAGTSAQRAELIALTQALKMAEGKKLNVYTDSRYAFATAHIHGEIYRRRGWLTSEGKEIKNKDEILALLKALFLPKRLSIIHCPGHQKGHSAEARGNRMADQAARKAAITETPDTSTLLAGKRTADGSEFEKRTADGSEFESPKKKAKVE

SEQ ID NO: 2820 - protein, 2091 aa, synthetic construct
  source 1..2091: note = Description of Artificial Sequence: Synthetic polypeptide
MPAAKRVKLDGGDKKYSIGLDIGTNSVGWAVITDEYKVPSKKFKVLGNTDRHSIKKNLIGALLFDSGETAEATRLKRTARRRYTRRKNRICYLQEIFSNEMAKVDDSFFHRLEESFLVEEDKKHERHPIFGNIVDEVAYHEKYPTIYHLRKKLVDSTDKADLRLIYLALAHMIKFRGHFLIEGDLNPDNSDVDKLFIQLVQTYNQLFEENPINASGVDAKAILSARLSKSRRLENLIAQLPGEKKNGLFGNLIALSLGLTPNFKSNFDLAEDAKLQLSKDTYDDDLDNLLAQIGDQYADLFLAAKNLSDAILLSDILRVNTEITKAPLSASMIKRYDEHHQDLTLLKALVRQQLPEKYKEIFFDQSKNGYAGYIDGGASQEEFYKFIKPILEKMDGTEELLVKLNREDLLRKQRTFDNGSIPHQIHLGELHAILRRQEDFYPFLKDNREKIEKILTFRIPYYVGPLARGNSRFAWMTRKSEETITPWNFEEVVDKGASAQSFIERMTNFDKNLPNEKVLPKHSLLYEYFTVYNELTKVKYVTEGMRKPAFLSGEQKKAIVDLLFKTNRKVTVKQLKEDYFKKIECFDSVEISGVEDRFNASLGTYHDLLKIIKDKDFLDNEENEDILEDIVLTLTLFEDREMIEERLKTYAHLFDDKVMKQLKRRRYTGWGRLSRKLINGIRDKQSGKTILDFLKSDGFANRNFMQLIHDDSLTFKEDIQKAQVSGQGDSLHEHIANLAGSPAIKKGILQTVKVVDELVKVMGRHKPENIVIEMARENQTTQKGQKNSRERMKRIEEGIKELGSQILKEHPVENTQLQNEKLYLYYLQNGRDMYVDQELDINRLSDYDVDHIVPQSFLKDDSIDNKVLTRSDKARGKSDNVPSEEVVKKMKNYWRQLLNAKLITQRKFDNLTKAERGGLSELDKAGFIKRQLVETRQITKHVAQILDSRMNTKYDENDKLIREVKVITLKSKLVSDFRKDFQFYKVREINNYHHAHDAYLNAVVGTALIKKYPKLESEFVYGDYKVYDVRKMIAKSEQEIGKATAKYFFYSNIMNFFKTEITLANGEIRKRPLIETNGETGEIVWDKGRDFATVRKVLSMPQVNIVKKTEVQTGGFSKESILPKRNSDKLIARKKDWDPKKYGGFDSPTVAYSVLVVAKVEKGKSKKLKSVKELLGITIMERSSFEKNPIDFLEAKGYKEVKKDLIIKLPKYSLFELENGRKRMLASAGELQKGNELALPSKYVNFLYLASHYEKLKGSPEDNEQKQLFVEQHKHYLDEIIEQISEFSKRVILADANLDKVLSAYNKHRDKPIREQAENIIHLFTLTNLGAPAAFKYFDTTIDRKRYTSTKEVLDATLIHQSITGLYETRIDLSQLGGDGGGGGGSSGGTLNIEDEHRLHETSKEPDVSLGSTWLSDFPQAWAETGGMGLAVRQAPLIIPLKATSTPVSIKQYPMSQEARLGIKPHIQRLLDQGILVPCQSPWNTPLLPVKKPGTNDYRPVQDLREVNKRVEDIHPTVPNPYNLLSGLPPSHQWYTVLDLKDAFFCLRLHPTSQPLFAFEWRDPEMGISGQLTWTRLPQGFKNSPTLFNEALHRDLADFRIQHPDLILLQYVDDLLLAATSELDCQQGTRALLQTLGNLGYRASAKKAQICQKQVKYLGYLLKEGQRWLTEARKETVMGQPTPKTPRQLREFLGKAGFCRLFIPGFAEMAAPLYPLTKPGTLFNWGPDQQKAYQEIKQALLTAPALGLPDLTKPFELFVDEKQGYAKGVLTQKLGPWRRPVAYLSKKLDPVAAGWPPCLRMVAAIAVLTKDAGKLTMGQPLVILAPHAVEALVKQPPDRWLSNARMTHYQALLLDTDRVQFGPVVALNPATLLPLPEEGLQHNCLDILAEAHGTRPDLTDQPLPDADHTWYTDGSSLLQEGQRKAGAAVTTETEVIWAKALPAGTSAQRAELIALTQALKMAEGKKLNVYTDSRYAFATAHIHGEIYRRRGWLTSEGKEIKNKDEILALLKALFLPKRLSIIHCPGHQKGHSAEARGNRMADQAARKAAITETPDTSTLLAGKRTADGSEFEKRTADGSEFESPKKKAKVE

SEQ ID NO: 2821 - protein, 2093 aa, synthetic construct
  source 1..2093: note = Description of Artificial Sequence: Synthetic polypeptide
MPAAKRVKLDGGDKKYSIGLDIGTNSVGWAVITDEYKVPSKKFKVLGNTDRHSIKKNLIGALLFDSGETAEATRLKRTARRRYTRRKNRICYLQEIFSNEMAKVDDSFFHRLEESFLVEEDKKHERHPIFGNIVDEVAYHEKYPTIYHLRKKLVDSTDKADLRLIYLALAHMIKFRGHFLIEGDLNPDNSDVDKLFIQLVQTYNQLFEENPINASGVDAKAILSARLSKSRRLENLIAQLPGEKKNGLFGNLIALSLGLTPNFKSNFDLAEDAKLQLSKDTYDDDLDNLLAQIGDQYADLFLAAKNLSDAILLSDILRVNTEITKAPLSASMIKRYDEHHQDLTLLKALVRQQLPEKYKEIFFDQSKNGYAGYIDGGASQEEFYKFIKPILEKMDGTEELLVKLNREDLLRKQRTFDNGSIPHQIHLGELHAILRRQEDFYPFLKDNREKIEKILTFRIPYYVGPLARGNSRFAWMTRKSEETITPWNFEEVVDKGASAQSFIERMTNFDKNLPNEKVLPKHSLLYEYFTVYNELTKVKYVTEGMRKPAFLSGEQKKAIVDLLFKTNRKVTVKQLKEDYFKKIECFDSVEISGVEDRFNASLGTYHDLLKIIKDKDFLDNEENEDILEDIVLTLTLFEDREMIEERLKTYAHLFDDKVMKQLKRRRYTGWGRLSRKLINGIRDKQSGKTILDFLKSDGFANRNFMQLIHDDSLTFKEDIQKAQVSGQGDSLHEHIANLAGSPAIKKGILQTVKVVDELVKVMGRHKPENIVIEMARENQTTQKGQKNSRERMKRIEEGIKELGSQILKEHPVENTQLQNEKLYLYYLQNGRDMYVDQELDINRLSDYDVDHIVPQSFLKDDSIDNKVLTRSDKARGKSDNVPSEEVVKKMKNYWRQLLNAKLITQRKFDNLTKAERGGLSELDKAGFIKRQLVETRQITKHVAQILDSRMNTKYDENDKLIREVKVITLKSKLVSDFRKDFQFYKVREINNYHHAHDAYLNAVVGTALIKKYPKLESEFVYGDYKVYDVRKMIAKSEQEIGKATAKYFFYSNIMNFFKTEITLANGEIRKRPLIETNGETGEIVWDKGRDFATVRKVLSMPQVNIVKKTEVQTGGFSKESILPKRNSDKLIARKKDWDPKKYGGFDSPTVAYSVLVVAKVEKGKSKKLKSVKELLGITIMERSSFEKNPIDFLEAKGYKEVKKDLIIKLPKYSLFELENGRKRMLASAGELQKGNELALPSKYVNFLYLASHYEKLKGSPEDNEQKQLFVEQHKHYLDEIIEQISEFSKRVILADANLDKVLSAYNKHRDKPIREQAENIIHLFTLTNLGAPAAFKYFDTTIDRKRYTSTKEVLDATLIHQSITGLYETRIDLSQLGGDGGEAAAKGSSGGTLNIEDEHRLHETSKEPDVSLGSTWLSDFPQAWAETGGMGLAVRQAPLIIPLKATSTPVSIKQYPMSQEARLGIKPHIQRLLDQGILVPCQSPWNTPLLPVKKPGTNDYRPVQDLREVNKRVEDIHPTVPNPYNLLSGLPPSHQWYTVLDLKDAFFCLRLHPTSQPLFAFEWRDPEMGISGQLTWTRLPQGFKNSPTLFNEALHRDLADFRIQHPDLILLQYVDDLLLAATSELDCQQGTRALLQTLGNLGYRASAKKAQICQKQVKYLGYLLKEGQRWLTEARKETVMGQPTPKTPRQLREFLGKAGFCRLFIPGFAEMAAPLYPLTKPGTLFNWGPDQQKAYQEIKQALLTAPALGLPDLTKPFELFVDEKQGYAKGVLTQKLGPWRRPVAYLSKKLDPVAAGWPPCLRMVAAIAVLTKDAGKLTMGQPLVILAPHAVEALVKQPPDRWLSNARMTHYQALLLDTDRVQFGPVVALNPATLLPLPEEGLQHNCLDILAEAHGTRPDLTDQPLPDADHTWYTDGSSLLQEGQRKAGAAVTTETEVIWAKALPAGTSAQRAELIALTQALKMAEGKKLNVYTDSRYAFATAHIHGEIYRRRGWLTSEGKEIKNKDEILALLKALFLPKRLSIIHCPGHQKGHSAEARGNRMADQAARKAAITETPDTSTLLAGKRTADGSEFEKRTADGSEFESPKKKAKVE

SEQ ID NO: 2822 - protein, 2096 aa, synthetic construct
  source 1..2096: note = Description of Artificial Sequence: Synthetic polypeptide
MPAAKRVKLDGGDKKYSIGLDIGTNSVGWAVITDEYKVPSKKFKVLGNTDRHSIKKNLIGALLFDSGETAEATRLKRTARRRYTRRKNRICYLQEIFSNEMAKVDDSFFHRLEESFLVEEDKKHERHPIFGNIVDEVAYHEKYPTIYHLRKKLVDSTDKADLRLIYLALAHMIKFRGHFLIEGDLNPDNSDVDKLFIQLVQTYNQLFEENPINASGVDAKAILSARLSKSRRLENLIAQLPGEKKNGLFGNLIALSLGLTPNFKSNFDLAEDAKLQLSKDTYDDDLDNLLAQIGDQYADLFLAAKNLSDAILLSDILRVNTEITKAPLSASMIKRYDEHHQDLTLLKALVRQQLPEKYKEIFFDQSKNGYAGYIDGGASQEEFYKFIKPILEKMDGTEELLVKLNREDLLRKQRTFDNGSIPHQIHLGELHAILRRQEDFYPFLKDNREKIEKILTFRIPYYVGPLARGNSRFAWMTRKSEETITPWNFEEVVDKGASAQSFIERMTNFDKNLPNEKVLPKHSLLYEYFTVYNELTKVKYVTEGMRKPAFLSGEQKKAIVDLLFKTNRKVTVKQLKEDYFKKIECFDSVEISGVEDRFNASLGTYHDLLKIIKDKDFLDNEENEDILEDIVLTLTLFEDREMIEERLKTYAHLFDDKVMKQLKRRRYTGWGRLSRKLINGIRDKQSGKTILDFLKSDGFANRNFMQLIHDDSLTFKEDIQKAQVSGQGDSLHEHIANLAGSPAIKKGILQTVKVVDELVKVMGRHKPENIVIEMARENQTTQKGQKNSRERMKRIEEGIKELGSQILKEHPVENTQLQNEKLYLYYLQNGRDMYVDQELDINRLSDYDVDHIVPQSFLKDDSIDNKVLTRSDKARGKSDNVPSEEVVKKMKNYWRQLLNAKLITQRKFDNLTKAERGGLSELDKAGFIKRQLVETRQITKHVAQILDSRMNTKYDENDKLIREVKVITLKSKLVSDFRKDFQFYKVREINNYHHAHDAYLNAVVGTALIKKYPKLESEFVYGDYKVYDVRKMIAKSEQEIGKATAKYFFYSNIMNFFKTEITLANGEIRKRPLIETNGETGEIVWDKGRDFATVRKVLSMPQVNIVKKTEVQTGGFSKESILPKRNSDKLIARKKDWDPKKYGGFDSPTVAYSVLVVAKVEKGKSKKLKSVKELLGITIMERSSFEKNPIDFLEAKGYKEVKKDLIIKLPKYSLFELENGRKRMLASAGELQKGNELALPSKYVNFLYLASHYEKLKGSPEDNEQKQLFVEQHKHYLDEIIEQISEFSKRVILADANLDKVLSAYNKHRDKPIREQAENIIHLFTLTNLGAPAAFKYFDTTIDRKRYTSTKEVLDATLIHQSITGLYETRIDLSQLGGDGGPAPGGGEAAAKGGTLNIEDEHRLHETSKEPDVSLGSTWLSDFPQAWAETGGMGLAVRQAPLIIPLKATSTPVSIKQYPMSQEARLGIKPHIQRLLDQGILVPCQSPWNTPLLPVKKPGTNDYRPVQDLREVNKRVEDIHPTVPNPYNLLSGLPPSHQWYTVLDLKDAFFCLRLHPTSQPLFAFEWRDPEMGISGQLTWTRLPQGFKNSPTLFNEALHRDLADFRIQHPDLILLQYVDDLLLAATSELDCQQGTRALLQTLGNLGYRASAKKAQICQKQVKYLGYLLKEGQRWLTEARKETVMGQPTPKTPRQLREFLGKAGFCRLFIPGFAEMAAPLYPLTKPGTLFNWGPDQQKAYQEIKQALLTAPALGLPDLTKPFELFVDEKQGYAKGVLTQKLGPWRRPVAYLSKKLDPVAAGWPPCLRMVAAIAVLTKDAGKLTMGQPLVILAPHAVEALVKQPPDRWLSNARMTHYQALLLDTDRVQFGPVVALNPATLLPLPEEGLQHNCLDILAEAHGTRPDLTDQPLPDADHTWYTDGSSLLQEGQRKAGAAVTTETEVIWAKALPAGTSAQRAELIALTQALKMAEGKKLNVYTDSRYAFATAHIHGEIYRRRGWLTSEGKEIKNKDEILALLKALFLPKRLSIIHCPGHQKGHSAEARGNRMADQAARKAAITETPDTSTLLAGKRTADGSEFEKRTADGSEFESPKKKAKVE

SEQ ID NO: 2823 - protein, 2090 aa, synthetic construct
  source 1..2090: note = Description of Artificial Sequence: Synthetic polypeptide
MPAAKRVKLDGGDKKYSIGLDIGTNSVGWAVITDEYKVPSKKFKVLGNTDRHSIKKNLIGALLFDSGETAEATRLKRTARRRYTRRKNRICYLQEIFSNEMAKVDDSFFHRLEESFLVEEDKKHERHPIFGNIVDEVAYHEKYPTIYHLRKKLVDSTDKADLRLIYLALAHMIKFRGHFLIEGDLNPDNSDVDKLFIQLVQTYNQLFEENPINASGVDAKAILSARLSKSRRLENLIAQLPGEKKNGLFGNLIALSLGLTPNFKSNFDLAEDAKLQLSKDTYDDDLDNLLAQIGDQYADLFLAAKNLSDAILLSDILRVNTEITKAPLSASMIKRYDEHHQDLTLLKALVRQQLPEKYKEIFFDQSKNGYAGYIDGGASQEEFYKFIKPILEKMDGTEELLVKLNREDLLRKQRTFDNGSIPHQIHLGELHAILRRQEDFYPFLKDNREKIEKILTFRIPYYVGPLARGNSRFAWMTRKSEETITPWNFEEVVDKGASAQSFIERMTNFDKNLPNEKVLPKHSLLYEYFTVYNELTKVKYVTEGMRKPAFLSGEQKKAIVDLLFKTNRKVTVKQLKEDYFKKIECFDSVEISGVEDRFNASLGTYHDLLKIIKDKDFLDNEENEDILEDIVLTLTLFEDREMIEERLKTYAHLFDDKVMKQLKRRRYTGWGRLSRKLINGIRDKQSGKTILDFLKSDGFANRNFMQLIHDDSLTFKEDIQKAQVSGQGDSLHEHIANLAGSPAIKKGILQTVKVVDELVKVMGRHKPENIVIEMARENQTTQKGQKNSRERMKRIEEGIKELGSQILKEHPVENTQLQNEKLYLYYLQNGRDMYVDQELDINRLSDYDVDHIVPQSFLKDDSIDNKVLTRSDKARGKSDNVPSEEVVKKMKNYWRQLLNAKLITQRKFDNLTKAERGGLSELDKAGFIKRQLVETRQITKHVAQILDSRMNTKYDENDKLIREVKVITLKSKLVSDFRKDFQFYKVREINNYHHAHDAYLNAVVGTALIKKYPKLESEFVYGDYKVYDVRKMIAKSEQEIGKATAKYFFYSNIMNFFKTEITLANGEIRKRPLIETNGETGEIVWDKGRDFATVRKVLSMPQVNIVKKTEVQTGGFSKESILPKRNSDKLIARKKDWDPKKYGGFDSPTVAYSVLVVAKVEKGKSKKLKSVKELLGITIMERSSFEKNPIDFLEAKGYKEVKKDLIIKLPKYSLFELENGRKRMLASAGELQKGNELALPSKYVNFLYLASHYEKLKGSPEDNEQKQLFVEQHKHYLDEIIEQISEFSKRVILADANLDKVLSAYNKHRDKPIREQAENIIHLFTLTNLGAPAAFKYFDTTIDRKRYTSTKEVLDATLIHQSITGLYETRIDLSQLGGDGGEAAAKGGTLNIEDEHRLHETSKEPDVSLGSTWLSDFPQAWAETGGMGLAVRQAPLIIPLKATSTPVSIKQYPMSQEARLGIKPHIQRLLDQGILVPCQSPWNTPLLPVKKPGTNDYRPVQDLREVNKRVEDIHPTVPNPYNLLSGLPPSHQWYTVLDLKDAFFCLRLHPTSQPLFAFEWRDPEMGISGQLTWTRLPQGFKNSPTLFNEALHRDLADFRIQHPDLILLQYVDDLLLAATSELDCQQGTRALLQTLGNLGYRASAKKAQICQKQVKYLGYLLKEGQRWLTEARKETVMGQPTPKTPRQLREFLGKAGFCRLFIPGFAEMAAPLYPLTKPGTLFNWGPDQQKAYQEIKQALLTAPALGLPDLTKPFELFVDEKQGYAKGVLTQKLGPWRRPVAYLSKKLDPVAAGWPPCLRMVAAIAVLTKDAGKLTMGQPLVILAPHAVEALVKQPPDRWLSNARMTHYQALLLDTDRVQFGPVVALNPATLLPLPEEGLQHNCLDILAEAHGTRPDLTDQPLPDADHTWYTDGSSLLQEGQRKAGAAVTTETEVIWAKALPAGTSAQRAELIALTQALKMAEGKKLNVYTDSRYAFATAHIHGEIYRRRGWLTSEGKEIKNKDEILALLKALFLPKRLSIIHCPGHQKGHSAEARGNRMADQAARKAAITETPDTSTLLAGKRTADGSEFEKRTADGSEFESPKKKAKVE

SEQ ID NO: 2824 - protein, 2088 aa, synthetic construct
  source 1..2088: note = Description of Artificial Sequence: Synthetic polypeptide
MPAAKRVKLDGGDKKYSIGLDIGTNSVGWAVITDEYKVPSKKFKVLGNTDRHSIKKNLIGALLFDSGETAEATRLKRTARRRYTRRKNRICYLQEIFSNEMAKVDDSFFHRLEESFLVEEDKKHERHPIFGNIVDEVAYHEKYPTIYHLRKKLVDSTDKADLRLIYLALAHMIKFRGHFLIEGDLNPDNSDVDKLFIQLVQTYNQLFEENPINASGVDAKAILSARLSKSRRLENLIAQLPGEKKNGLFGNLIALSLGLTPNFKSNFDLAEDAKLQLSKDTYDDDLDNLLAQIGDQYADLFLAAKNLSDAILLSDILRVNTEITKAPLSASMIKRYDEHHQDLTLLKALVRQQLPEKYKEIFFDQSKNGYAGYIDGGASQEEFYKFIKPILEKMDGTEELLVKLNREDLLRKQRTFDNGSIPHQIHLGELHAILRRQEDFYPFLKDNREKIEKILTFRIPYYVGPLARGNSRFAWMTRKSEETITPWNFEEVVDKGASAQSFIERMTNFDKNLPNEKVLPKHSLLYEYFTVYNELTKVKYVTEGMRKPAFLSGEQKKAIVDLLFKTNRKVTVKQLKEDYFKKIECFDSVEISGVEDRFNASLGTYHDLLKIIKDKDFLDNEENEDILEDIVLTLTLFEDREMIEERLKTYAHLFDDKVMKQLKRRRYTGWGRLSRKLINGIRDKQSGKTILDFLKSDGFANRNFMQLIHDDSLTFKEDIQKAQVSGQGDSLHEHIANLAGSPAIKKGILQTVKVVDELVKVMGRHKPENIVIEMARENQTTQKGQKNSRERMKRIEEGIKELGSQILKEHPVENTQLQNEKLYLYYLQNGRDMYVDQELDINRLSDYDVDHIVPQSFLKDDSIDNKVLTRSDKARGKSDNVPSEEVVKKMKNYWRQLLNAKLITQRKFDNLTKAERGGLSELDKAGFIKRQLVETRQITKHVAQILDSRMNTKYDENDKLIREVKVITLKSKLVSDFRKDFQFYKVREINNYHHAHDAYLNAVVGTALIKKYPKLESEFVYGDYKVYDVRKMIAKSEQEIGKATAKYFFYSNIMNFFKTEITLANGEIRKRPLIETNGETGEIVWDKGRDFATVRKVLSMPQVNIVKKTEVQTGGFSKESILPKRNSDKLIARKKDWDPKKYGGFDSPTVAYSVLVVAKVEKGKSKKLKSVKELLGITIMERSSFEKNPIDFLEAKGYKEVKKDLIIKLPKYSLFELENGRKRMLASAGELQKGNELALPSKYVNFLYLASHYEKLKGSPEDNEQKQLFVEQHKHYLDEIIEQISEFSKRVILADANLDKVLSAYNKHRDKPIREQAENIIHLFTLTNLGAPAAFKYFDTTIDRKRYTSTKEVLDATLIHQSITGLYETRIDLSQLGGDGGGGGGGTLNIEDEHRLHETSKEPDVSLGSTWLSDFPQAWAETGGMGLAVRQAPLIIPLKATSTPVSIKQYPMSQEARLGIKPHIQRLLDQGILVPCQSPWNTPLLPVKKPGTNDYRPVQDLREVNKRVEDIHPTVPNPYNLLSGLPPSHQWYTVLDLKDAFFCLRLHPTSQPLFAFEWRDPEMGISGQLTWTRLPQGFKNSPTLFNEALHRDLADFRIQHPDLILLQYVDDLLLAATSELDCQQGTRALLQTLGNLGYRASAKKAQICQKQVKYLGYLLKEGQRWLTEARKETVMGQPTPKTPRQLREFLGKAGFCRLFIPGFAEMAAPLYPLTKPGTLFNWGPDQQKAYQEIKQALLTAPALGLPDLTKPFELFVDEKQGYAKGVLTQKLGPWRRPVAYLSKKLDPVAAGWPPCLRMVAAIAVLTKDAGKLTMGQPLVILAPHAVEALVKQPPDRWLSNARMTHYQALLLDTDRVQFGPVVALNPATLLPLPEEGLQHNCLDILAEAHGTRPDLTDQPLPDADHTWYTDGSSLLQEGQRKAGAAVTTETEVIWAKALPAGTSAQRAELIALTQALKMAEGKKLNVYTDSRYAFATAHIHGEIYRRRGWLTSEGKEIKNKDEILALLKALFLPKRLSIIHCPGHQKGHSAEARGNRMADQAARKAAITETPDTSTLLAGKRTADGSEFEKRTADGSEFESPKKKAKVE

SEQ ID NO: 2825 - protein, 2090 aa, synthetic construct
  source 1..2090: note = Description of Artificial Sequence: Synthetic polypeptide
MPAAKRVKLDGGDKKYSIGLDIGTNSVGWAVITDEYKVPSKKFKVLGNTDRHSIKKNLIGALLFDSGETAEATRLKRTARRRYTRRKNRICYLQEIFSNEMAKVDDSFFHRLEESFLVEEDKKHERHPIFGNIVDEVAYHEKYPTIYHLRKKLVDSTDKADLRLIYLALAHMIKFRGHFLIEGDLNPDNSDVDKLFIQLVQTYNQLFEENPINASGVDAKAILSARLSKSRRLENLIAQLPGEKKNGLFGNLIALSLGLTPNFKSNFDLAEDAKLQLSKDTYDDDLDNLLAQIGDQYADLFLAAKNLSDAILLSDILRVNTEITKAPLSASMIKRYDEHHQDLTLLKALVRQQLPEKYKEIFFDQSKNGYAGYIDGGASQEEFYKFIKPILEKMDGTEELLVKLNREDLLRKQRTFDNGSIPHQIHLGELHAILRRQEDFYPFLKDNREKIEKILTFRIPYYVGPLARGNSRFAWMTRKSEETITPWNFEEVVDKGASAQSFIERMTNFDKNLPNEKVLPKHSLLYEYFTVYNELTKVKYVTEGMRKPAFLSGEQKKAIVDLLFKTNRKVTVKQLKEDYFKKIECFDSVEISGVEDRFNASLGTYHDLLKIIKDKDFLDNEENEDILEDIVLTLTLFEDREMIEERLKTYAHLFDDKVMKQLKRRRYTGWGRLSRKLINGIRDKQSGKTILDFLKSDGFANRNFMQLIHDDSLTFKEDIQKAQVSGQGDSLHEHIANLAGSPAIKKGILQTVKVVDELVKVMGRHKPENIVIEMARENQTTQKGQKNSRERMKRIEEGIKELGSQILKEHPVENTQLQNEKLYLYYLQNGRDMYVDQELDINRLSDYDVDHIVPQSFLKDDSIDNKVLTRSDKARGKSDNVPSEEVVKKMKNYWRQLLNAKLITQRKFDNLTKAERGGLSELDKAGFIKRQLVETRQITKHVAQILDSRMNTKYDENDKLIREVKVITLKSKLVSDFRKDFQFYKVREINNYHHAHDAYLNAVVGTALIKKYPKLESEFVYGDYKVYDVRKMIAKSEQEIGKATAKYFFYSNIMNFFKTEITLANGEIRKRPLIETNGETGEIVWDKGRDFATVRKVLSMPQVNIVKKTEVQTGGFSKESILPKRNSDKLIARKKDWDPKKYGGFDSPTVAYSVLVVAKVEKGKSKKLKSVKELLGITIMERSSFEKNPIDFLEAKGYKEVKKDLIIKLPKYSLFELENGRKRMLASAGELQKGNELALPSKYVNFLYLASHYEKLKGSPEDNEQKQLFVEQHKHYLDEIIEQISEFSKRVILADANLDKVLSAYNKHRDKPIREQAENIIHLFTLTNLGAPAAFKYFDTTIDRKRYTSTKEVLDATLIHQSITGLYETRIDLSQLGGDGGGGGGSGGTLNIEDEHRLHETSKEPDVSLGSTWLSDFPQAWAETGGMGLAVRQAPLIIPLKATSTPVSIKQYPMSQEARLGIKPHIQRLLDQGILVPCQSPWNTPLLPVKKPGTNDYRPVQDLREVNKRVEDIHPTVPNPYNLLSGLPPSHQWYTVLDLKDAFFCLRLHPTSQPLFAFEWRDPEMGISGQLTWTRLPQGFKNSPTLFNEALHRDLADFRIQHPDLILLQYVDDLLLAATSELDCQQGTRALLQTLGNLGYRASAKKAQICQKQVKYLGYLLKEGQRWLTEARKETVMGQPTPKTPRQLREFLGKAGFCRLFIPGFAEMAAPLYPLTKPGTLFNWGPDQQKAYQEIKQALLTAPALGLPDLTKPFELFVDEKQGYAKGVLTQKLGPWRRPVAYLSKKLDPVAAGWPPCLRMVAAIAVLTKDAGKLTMGQPLVILAPHAVEALVKQPPDRWLSNARMTHYQALLLDTDRVQFGPVVALNPATLLPLPEEGLQHNCLDILAEAHGTRPDLTDQPLPDADHTWYTDGSSLLQEGQRKAGAAVTTETEVIWAKALPAGTSAQRAELIALTQALKMAEGKKLNVYTDSRYAFATAHIHGEIYRRRGWLTSEGKEIKNKDEILALLKALFLPKRLSIIHCPGHQKGHSAEARGNRMADQAARKAAITETPDTSTLLAGKRTADGSEFEKRTADGSEFESPKKKAKVE

SEQ ID NO: 2826 - protein, 2096 aa, synthetic construct
  source 1..2096: note = Description of Artificial Sequence: Synthetic polypeptide
MPAAKRVKLDGGDKKYSIGLDIGTNSVGWAVITDEYKVPSKKFKVLGNTDRHSIKKNLIGALLFDSGETAEATRLKRTARRRYTRRKNRICYLQEIFSNEMAKVDDSFFHRLEESFLVEEDKKHERHPIFGNIVDEVAYHEKYPTIYHLRKKLVDSTDKADLRLIYLALAHMIKFRGHFLIEGDLNPDNSDVDKLFIQLVQTYNQLFEENPINASGVDAKAILSARLSKSRRLENLIAQLPGEKKNGLFGNLIALSLGLTPNFKSNFDLAEDAKLQLSKDTYDDDLDNLLAQIGDQYADLFLAAKNLSDAILLSDILRVNTEITKAPLSASMIKRYDEHHQDLTLLKALVRQQLPEKYKEIFFDQSKNGYAGYIDGGASQEEFYKFIKPILEKMDGTEELLVKLNREDLLRKQRTFDNGSIPHQIHLGELHAILRRQEDFYPFLKDNREKIEKILTFRIPYYVGPLARGNSRFAWMTRKSEETITPWNFEEVVDKGASAQSFIERMTNFDKNLPNEKVLPKHSLLYEYFTVYNELTKVKYVTEGMRKPAFLSGEQKKAIVDLLFKTNRKVTVKQLKEDYFKKIECFDSVEISGVEDRFNASLGTYHDLLKIIKDKDFLDNEENEDILEDIVLTLTLFEDREMIEERLKTYAHLFDDKVMKQLKRRRYTGWGRLSRKLINGIRDKQSGKTILDFLKSDGFANRNFMQLIHDDSLTFKEDIQKAQVSGQGDSLHEHIANLAGSPAIKKGILQTVKVVDELVKVMGRHKPENIVIEMARENQTTQKGQKNSRERMKRIEEGIKELGSQILKEHPVENTQLQNEKLYLYYLQNGRDMYVDQELDINRLSDYDVDHIVPQSFLKDDSIDNKVLTRSDKARGKSDNVPSEEVVKKMKNYWRQLLNAKLITQRKFDNLTKAERGGLSELDKAGFIKRQLVETRQITKHVAQILDSRMNTKYDENDKLIREVKVITLKSKLVSDFRKDFQFYKVREINNYHHAHDAYLNAVVGTALIKKYPKLESEFVYGDYKVYDVRKMIAKSEQEIGKATAKYFFYSNIMNFFKTEITLANGEIRKRPLIETNGETGEIVWDKGRDFATVRKVLSMPQVNIVKKTEVQTGGFSKESILPKRNSDKLIARKKDWDPKKYGGFDSPTVAYSVLVVAKVEKGKSKKLKSVKELLGITIMERSSFEKNPIDFLEAKGYKEVKKDLIIKLPKYSLFELENGRKRMLASAGELQKGNELALPSKYVNFLYLASHYEKLKGSPEDNEQKQLFVEQHKHYLDEIIEQISEFSKRVILADANLDKVLSAYNKHRDKPIREQAENIIHLFTLTNLGAPAAFKYFDTTIDRKRYTSTKEVLDATLIHQSITGLYETRIDLSQLGGDGGGGSEAAAKGSSGGTLNIEDEHRLHETSKEPDVSLGSTWLSDFPQAWAETGGMGLAVRQAPLIIPLKATSTPVSIKQYPMSQEARLGIKPHIQRLLDQGILVPCQSPWNTPLLPVKKPGTNDYRPVQDLREVNKRVEDIHPTVPNPYNLLSGLPPSHQWYTVLDLKDAFFCLRLHPTSQPLFAFEWRDPEMGISGQLTWTRLPQGFKNSPTLFNEALHRDLADFRIQHPDLILLQYVDDLLLAATSELDCQQGTRALLQTLGNLGYRASAKKAQICQKQVKYLGYLLKEGQRWLTEARKETVMGQPTPKTPRQLREFLGKAGFCRLFIPGFAEMAAPLYPLTKPGTLFNWGPDQQKAYQEIKQALLTAPALGLPDLTKPFELFVDEKQGYAKGVLTQKLGPWRRPVAYLSKKLDPVAAGWPPCLRMVAAIAVLTKDAGKLTMGQPLVILAPHAVEALVKQPPDRWLSNARMTHYQALLLDTDRVQFGPVVALNPATLLPLPEEGLQHNCLDILAEAHGTRPDLTDQPLPDADHTWYTDGSSLLQEGQRKAGAAVTTETEVIWAKALPAGTSAQRAELIALTQALKMAEGKKLNVYTDSRYAFATAHIHGEIYRRRGWLTSEGKEIKNKDEILALLKALFLPKRLSIIHCPGHQKGHSAEARGNRMADQAARKAAITETPDTSTLLAGKRTADGSEFEKRTADGSEFESPKKKAKVE

SEQ ID NO: 2827 - protein, 2115 aa, synthetic construct
  source 1..2115: note = Description of Artificial Sequence: Synthetic polypeptide
MPAAKRVKLDGGDKKYSIGLDIGTNSVGWAVITDEYKVPSKKFKVLGNTDRHSIKKNLIGALLFDSGETAEATRLKRTARRRYTRRKNRICYLQEIFSNEMAKVDDSFFHRLEESFLVEEDKKHERHPIFGNIVDEVAYHEKYPTIYHLRKKLVDSTDKADLRLIYLALAHMIKFRGHFLIEGDLNPDNSDVDKLFIQLVQTYNQLFEENPINASGVDAKAILSARLSKSRRLENLIAQLPGEKKNGLFGNLIALSLGLTPNFKSNFDLAEDAKLQLSKDTYDDDLDNLLAQIGDQYADLFLAAKNLSDAILLSDILRVNTEITKAPLSASMIKRYDEHHQDLTLLKALVRQQLPEKYKEIFFDQSKNGYAGYIDGGASQEEFYKFIKPILEKMDGTEELLVKLNREDLLRKQRTFDNGSIPHQIHLGELHAILRRQEDFYPFLKDNREKIEKILTFRIPYYVGPLARGNSRFAWMTRKSEETITPWNFEEVVDKGASAQSFIERMTNFDKNLPNEKVLPKHSLLYEYFTVYNELTKVKYVTEGMRKPAFLSGEQKKAIVDLLFKTNRKVTVKQLKEDYFKKIECFDSVEISGVEDRFNASLGTYHDLLKIIKDKDFLDNEENEDILEDIVLTLTLFEDREMIEERLKTYAHLFDDKVMKQLKRRRYTGWGRLSRKLINGIRDKQSGKTILDFLKSDGFANRNFMQLIHDDSLTFKEDIQKAQVSGQGDSLHEHIANLAGSPAIKKGILQTVKVVDELVKVMGRHKPENIVIEMARENQTTQKGQKNSRERMKRIEEGIKELGSQILKEHPVENTQLQNEKLYLYYLQNGRDMYVDQELDINRLSDYDVDHIVPQSFLKDDSIDNKVLTRSDKARGKSDNVPSEEVVKKMKNYWRQLLNAKLITQRKFDNLTKAERGGLSELDKAGFIKRQLVETRQITKHVAQILDSRMNTKYDENDKLIREVKVITLKSKLVSDFRKDFQFYKVREINNYHHAHDAYLNAVVGTALIKKYPKLESEFVYGDYKVYDVRKMIAKSEQEIGKATAKYFFYSNIMNFFKTEITLANGEIRKRPLIETNGETGEIVWDKGRDFATVRKVLSMPQVNIVKKTEVQTGGFSKESILPKRNSDKLIARKKDWDPKKYGGFDSPTVAYSVLVVAKVEKGKSKKLKSVKELLGITIMERSSFEKNPIDFLEAKGYKEVKKDLIIKLPKYSLFELENGRKRMLASAGELQKGNELALPSKYVNFLYLASHYEKLKGSPEDNEQKQLFVEQHKHYLDEIIEQISEFSKRVILADANLDKVLSAYNKHRDKPIREQAENIIHLFTLTNLGAPAAFKYFDTTIDRKRYTSTKEVLDATLIHQSITGLYETRIDLSQLGGDGGGGGGSGGGGSGGGGSGGGGSGGGGSGGGGSGGTLNIEDEHRLHETSKEPDVSLGSTWLSDFPQAWAETGGMGLAVRQAPLIIPLKATSTPVSIKQYPMSQEARLGIKPHIQRLLDQGILVPCQSPWNTPLLPVKKPGTNDYRPVQDLREVNKRVEDIHPTVPNPYNLLSGLPPSHQWYTVLDLKDAFFCLRLHPTSQPLFAFEWRDPEMGISGQLTWTRLPQGFKNSPTLFNEALHRDLADFRIQHPDLILLQYVDDLLLAATSELDCQQGTRALLQTLGNLGYRASAKKAQICQKQVKYLGYLLKEGQRWLTEARKETVMGQPTPKTPRQLREFLGKAGFCRLFIPGFAEMAAPLYPLTKPGTLFNWGPDQQKAYQEIKQALLTAPALGLPDLTKPFELFVDEKQGYAKGVLTQKLGPWRRPVAYLSKKLDPVAAGWPPCLRMVAAIAVLTKDAGKLTMGQPLVILAPHAVEALVKQPPDRWLSNARMTHYQALLLDTDRVQFGPVVALNPATLLPLPEEGLQHNCLDILAEAHGTRPDLTDQPLPDADHTWYTDGSSLLQEGQRKAGAAVTTETEVIWAKALPAGTSAQRAELIALTQALKMAEGKKLNVYTDSRYAFATAHIHGEIYRRRGWLTSEGKEIKNKDEILALLKALFLPKRLSIIHCPGHQKGHSAEARGNRMADQAARKAAITETPDTSTLLAGKRTADGSEFEKRTADGSEFESPKKKAKVE

SEQ ID NO: 2828 - protein, 2093 aa, synthetic construct
  source 1..2093: note = Description of Artificial Sequence: Synthetic polypeptide
MPAAKRVKLDGGDKKYSIGLDIGTNSVGWAVITDEYKVPSKKFKVLGNTDRHSIKKNLIGALLFDSGETAEATRLKRTARRRYTRRKNRICYLQEIFSNEMAKVDDSFFHRLEESFLVEEDKKHERHPIFGNIVDEVAYHEKYPTIYHLRKKLVDSTDKADLRLIYLALAHMIKFRGHFLIEGDLNPDNSDVDKLFIQLVQTYNQLFEENPINASGVDAKAILSARLSKSRRLENLIAQLPGEKKNGLFGNLIALSLGLTPNFKSNFDLAEDAKLQLSKDTYDDDLDNLLAQIGDQYADLFLAAKNLSDAILLSDILRVNTEITKAPLSASMIKRYDEHHQDLTLLKALVRQQLPEKYKEIFFDQSKNGYAGYIDGGASQEEFYKFIKPILEKMDGTEELLVKLNREDLLRKQRTFDNGSIPHQIHLGELHAILRRQEDFYPFLKDNREKIEKILTFRIPYYVGPLARGNSRFAWMTRKSEETITPWNFEEVVDKGASAQSFIERMTNFDKNLPNEKVLPKHSLLYEYFTVYNELTKVKYVTEGMRKPAFLSGEQKKAIVDLLFKTNRKVTVKQLKEDYFKKIECFDSVEISGVEDRFNASLGTYHDLLKIIKDKDFLDNEENEDILEDIVLTLTLFEDREMIEERLKTYAHLFDDKVMKQLKRRRYTGWGRLSRKLINGIRDKQSGKTILDFLKSDGFANRNFMQLIHDDSLTFKEDIQKAQVSGQGDSLHEHIANLAGSPAIKKGILQTVKVVDELVKVMGRHKPENIVIEMARENQTTQKGQKNSRERMKRIEEGIKELGSQILKEHPVENTQLQNEKLYLYYLQNGRDMYVDQELDINRLSDYDVDHIVPQSFLKDDSIDNKVLTRSDKARGKSDNVPSEEVVKKMKNYWRQLLNAKLITQRKFDNLTKAERGGLSELDKAGFIKRQLVETRQITKHVAQILDSRMNTKYDENDKLIREVKVITLKSKLVSDFRKDFQFYKVREINNYHHAHDAYLNAVVGTALIKKYPKLESEFVYGDYKVYDVRKMIAKSEQEIGKATAKYFFYSNIMNFFKTEITLANGEIRKRPLIETNGETGEIVWDKGRDFATVRKVLSMPQVNIVKKTEVQTGGFSKESILPKRNSDKLIARKKDWDPKKYGGFDSPTVAYSVLVVAKVEKGKSKKLKSVKELLGITIMERSSFEKNPIDFLEAKGYKEVKKDLIIKLPKYSLFELENGRKRMLASAGELQKGNELALPSKYVNFLYLASHYEKLKGSPEDNEQKQLFVEQHKHYLDEIIEQISEFSKRVILADANLDKVLSAYNKHRDKPIREQAENIIHLFTLTNLGAPAAFKYFDTTIDRKRYTSTKEVLDATLIHQSITGLYETRIDLSQLGGDGGGSSEAAAKGGTLNIEDEHRLHETSKEPDVSLGSTWLSDFPQAWAETGGMGLAVRQAPLIIPLKATSTPVSIKQYPMSQEARLGIKPHIQRLLDQGILVPCQSPWNTPLLPVKKPGTNDYRPVQDLREVNKRVEDIHPTVPNPYNLLSGLPPSHQWYTVLDLKDAFFCLRLHPTSQPLFAFEWRDPEMGISGQLTWTRLPQGFKNSPTLFNEALHRDLADFRIQHPDLILLQYVDDLLLAATSELDCQQGTRALLQTLGNLGYRASAKKAQICQKQVKYLGYLLKEGQRWLTEARKETVMGQPTPKTPRQLREFLGKAGFCRLFIPGFAEMAAPLYPLTKPGTLFNWGPDQQKAYQEIKQALLTAPALGLPDLTKPFELFVDEKQGYAKGVLTQKLGPWRRPVAYLSKKLDPVAAGWPPCLRMVAAIAVLTKDAGKLTMGQPLVILAPHAVEALVKQPPDRWLSNARMTHYQALLLDTDRVQFGPVVALNPATLLPLPEEGLQHNCLDILAEAHGTRPDLTDQPLPDADHTWYTDGSSLLQEGQRKAGAAVTTETEVIWAKALPAGTSAQRAELIALTQALKMAEGKKLNVYTDSRYAFATAHIHGEIYRRRGWLTSEGKEIKNKDEILALLKALFLPKRLSIIHCPGHQKGHSAEARGNRMADQAARKAAITETPDTSTLLAGKRTADGSEFEKRTADGSEFESPKKKAKVE

SEQ ID NO: 2829 - protein, 2096 aa, synthetic construct
  source 1..2096: note = Description of Artificial Sequence: Synthetic polypeptide
MPAAKRVKLDGGDKKYSIGLDIGTNSVGWAVITDEYKVPSKKFKVLGNTDRHSIKKNLIGALLFDSGETAEATRLKRTARRRYTRRKNRICYLQEIFSNEMAKVDDSFFHRLEESFLVEEDKKHERHPIFGNIVDEVAYHEKYPTIYHLRKKLVDSTDKADLRLIYLALAHMIKFRGHFLIEGDLNPDNSDVDKLFIQLVQTYNQLFEENPINASGVDAKAILSARLSKSRRLENLIAQLPGEKKNGLFGNLIALSLGLTPNFKSNFDLAEDAKLQLSKDTYDDDLDNLLAQIGDQYADLFLAAKNLSDAILLSDILRVNTEITKAPLSASMIKRYDEHHQDLTLLKALVRQQLPEKYKEIFFDQSKNGYAGYIDGGASQEEFYKFIKPILEKMDGTEELLVKLNREDLLRKQRTFDNGSIPHQIHLGELHAILRRQEDFYPFLKDNREKIEKILTFRIPYYVGPLARGNSRFAWMTRKSEETITPWNFEEVVDKGASAQSFIERMTNFDKNLPNEKVLPKHSLLYEYFTVYNELTKVKYVTEGMRKPAFLSGEQKKAIVDLLFKTNRKVTVKQLKEDYFKKIECFDSVEISGVEDRFNASLGTYHDLLKIIKDKDFLDNEENEDILEDIVLTLTLFEDREMIEERLKTYAHLFDDKVMKQLKRRRYTGWGRLSRKLINGIRDKQSGKTILDFLKSDGFANRNFMQLIHDDSLTFKEDIQKAQVSGQGDSLHEHIANLAGSPAIKKGILQTVKVVDELVKVMGRHKPENIVIEMARENQTTQKGQKNSRERMKRIEEGIKELGSQILKEHPVENTQLQNEKLYLYYLQNGRDMYVDQELDINRLSDYDVDHIVPQSFLKDDSIDNKVLTRSDKARGKSDNVPSEEVVKKMKNYWRQLLNAKLITQRKFDNLTKAERGGLSELDKAGFIKRQLVETRQITKHVAQILDSRMNTKYDENDKLIREVKVITLKSKLVSDFRKDFQFYKVREINNYHHAHDAYLNAVVGTALIKKYPKLESEFVYGDYKVYDVRKMIAKSEQEIGKATAKYFFYSNIMNFFKTEITLANGEIRKRPLIETNGETGEIVWDKGRDFATVRKVLSMPQVNIVKKTEVQTGGFSKESILPKRNSDKLIARKKDWDPKKYGGFDSPTVAYSVLVVAKVEKGKSKKLKSVKELLGITIMERSSFEKNPIDFLEAKGYKEVKKDLIIKLPKYSLFELENGRKRMLASAGELQKGNELALPSKYVNFLYLASHYEKLKGSPEDNEQKQLFVEQHKHYLDEIIEQISEFSKRVILADANLDKVLSAYNKHRDKPIREQAENIIHLFTLTNLGAPAAFKYFDTTIDRKRYTSTKEVLDATLIHQSITGLYETRIDLSQLGGDGGPAPEAAAKGGSGGTLNIEDEHRLHETSKEPDVSLGSTWLSDFPQAWAETGGMGLAVRQAPLIIPLKATSTPVSIKQYPMSQEARLGIKPHIQRLLDQGILVPCQSPWNTPLLPVKKPGTNDYRPVQDLREVNKRVEDIHPTVPNPYNLLSGLPPSHQWYTVLDLKDAFFCLRLHPTSQPLFAFEWRDPEMGISGQLTWTRLPQGFKNSPTLFNEALHRDLADFRIQHPDLILLQYVDDLLLAATSELDCQQGTRALLQTLGNLGYRASAKKAQICQKQVKYLGYLLKEGQRWLTEARKETVMGQPTPKTPRQLREFLGKAGFCRLFIPGFAEMAAPLYPLTKPGTLFNWGPDQQKAYQEIKQALLTAPALGLPDLTKPFELFVDEKQGYAKGVLTQKLGPWRRPVAYLSKKLDPVAAGWPPCLRMVAAIAVLTKDAGKLTMGQPLVILAPHAVEALVKQPPDRWLSNARMTHYQALLLDTDRVQFGPVVALNPATLLPLPEEGLQHNCLDILAEAHGTRPDLTDQPLPDADHTWYTDGSSLLQEGQRKAGAAVTTETEVIWAKALPAGTSAQRAELIALTQALKMAEGKKLNVYTDSRYAFATAHIHGEIYRRRGWLTSEGKEIKNKDEILALLKALFLPKRLSIIHCPGHQKGHSAEARGNRMADQAARKAAITETPDTSTLLAGKRTADGSEFEKRTADGSEFESPKKKAKVE

SEQ ID NO: 2830 - protein, 2096 aa, synthetic construct
  source 1..2096: note = Description of Artificial Sequence: Synthetic polypeptide
MPAAKRVKLDGGDKKYSIGLDIGTNSVGWAVITDEYKVPSKKFKVLGNTDRHSIKKNLIGALLFDSGETAEATRLKRTARRRYTRRKNRICYLQEIFSNEMAKVDDSFFHRLEESFLVEEDKKHERHPIFGNIVDEVAYHEKYPTIYHLRKKLVDSTDKADLRLIYLALAHMIKFRGHFLIEGDLNPDNSDVDKLFIQLVQTYNQLFEENPINASGVDAKAILSARLSKSRRLENLIAQLPGEKKNGLFGNLIALSLGLTPNFKSNFDLAEDAKLQLSKDTYDDDLDNLLAQIGDQYADLFLAAKNLSDAILLSDILRVNTEITKAPLSASMIKRYDEHHQDLTLLKALVRQQLPEKYKEIFFDQSKNGYAGYIDGGASQEEFYKFIKPILEKMDGTEELLVKLNREDLLRKQRTFDNGSIPHQIHLGELHAILRRQEDFYPFLKDNREKIEKILTFRIPYYVGPLARGNSRFAWMTRKSEETITPWNFEEVVDKGASAQSFIERMTNFDKNLPNEKVLPKHSLLYEYFTVYNELTKVKYVTEGMRKPAFLSGEQKKAIVDLLFKTNRKVTVKQLKEDYFKKIECFDSVEISGVEDRFNASLGTYHDLLKIIKDKDFLDNEENEDILEDIVLTLTLFEDREMIEERLKTYAHLFDDKVMKQLKRRRYTGWGRLSRKLINGIRDKQSGKTILDFLKSDGFANRNFMQLIHDDSLTFKEDIQKAQVSGQGDSLHEHIANLAGSPAIKKGILQTVKVVDELVKVMGRHKPENIVIEMARENQTTQKGQKNSRERMKRIEEGIKELGSQILKEHPVENTQLQNEKLYLYYLQNGRDMYVDQELDINRLSDYDVDHIVPQSFLKDDSIDNKVLTRSDKARGKSDNVPSEEVVKKMKNYWRQLLNAKLITQRKFDNLTKAERGGLSELDKAGFIKRQLVETRQITKHVAQILDSRMNTKYDENDKLIREVKVITLKSKLVSDFRKDFQFYKVREINNYHHAHDAYLNAVVGTALIKKYPKLESEFVYGDYKVYDVRKMIAKSEQEIGKATAKYFFYSNIMNFFKTEITLANGEIRKRPLIETNGETGEIVWDKGRDFATVRKVLSMPQVNIVKKTEVQTGGFSKESILPKRNSDKLIARKKDWDPKKYGGFDSPTVAYSVLVVAKVEKGKSKKLKSVKELLGITIMERSSFEKNPIDFLEAKGYKEVKKDLIIKLPKYSLFELENGRKRMLASAGELQKGNELALPSKYVNFLYLASHYEKLKGSPEDNEQKQLFVEQHKHYLDEIIEQISEFSKRVILADANLDKVLSAYNKHRDKPIREQAENIIHLFTLTNLGAPAAFKYFDTTIDRKRYTSTKEVLDATLIHQSITGLYETRIDLSQLGGDGGGGGEAAAKPAPGGTLNIEDEHRLHETSKEPDVSLGSTWLSDFPQAWAETGGMGLAVRQAPLIIPLKATSTPVSIKQYPMSQEARLGIKPHIQRLLDQGILVPCQSPWNTPLLPVKKPGTNDYRPVQDLREVNKRVEDIHPTVPNPYNLLSGLPPSHQWYTVLDLKDAFFCLRLHPTSQPLFAFEWRDPEMGISGQLTWTRLPQGFKNSPTLFNEALHRDLADFRIQHPDLILLQYVDDLLLAATSELDCQQGTRALLQTLGNLGYRASAKKAQICQKQVKYLGYLLKEGQRWLTEARKETVMGQPTPKTPRQLREFLGKAGFCRLFIPGFAEMAAPLYPLTKPGTLFNWGPDQQKAYQEIKQALLTAPALGLPDLTKPFELFVDEKQGYAKGVLTQKLGPWRRPVAYLSKKLDPVAAGWPPCLRMVAAIAVLTKDAGKLTMGQPLVILAPHAVEALVKQPPDRWLSNARMTHYQALLLDTDRVQFGPVVALNPATLLPLPEEGLQHNCLDILAEAHGTRPDLTDQPLPDADHTWYTDGSSLLQEGQRKAGAAVTTETEVIWAKALPAGTSAQRAELIALTQALKMAEGKKLNVYTDSRYAFATAHIHGEIYRRRGWLTSEGKEIKNKDEILALLKALFLPKRLSIIHCPGHQKGHSAEARGNRMADQAARKAAITETPDTSTLLAGKRTADGSEFEKRTADGSEFESPKKKAKVE

SEQ ID NO: 2831 - protein, 2096 aa, synthetic construct
  source 1..2096: note = Description of Artificial Sequence: Synthetic polypeptide
MPAAKRVKLDGGDKKYSIGLDIGTNSVGWAVITDEYKVPSKKFKVLGNTDRHSIKKNLIGALLFDSGETAEATRLKRTARRRYTRRKNRICYLQEIFSNEMAKVDDSFFHRLEESFLVEEDKKHERHPIFGNIVDEVAYHEKYPTIYHLRKKLVDSTDKADLRLIYLALAHMIKFRGHFLIEGDLNPDNSDVDKLFIQLVQTYNQLFEENPINASGVDAKAILSARLSKSRRLENLIAQLPGEKKNGLFGNLIALSLGLTPNFKSNFDLAEDAKLQLSKDTYDDDLDNLLAQIGDQYADLFLAAKNLSDAILLSDILRVNTEITKAPLSASMIKRYDEHHQDLTLLKALVRQQLPEKYKEIFFDQSKNGYAGYIDGGASQEEFYKFIKPILEKMDGTEELLVKLNREDLLRKQRTFDNGSIPHQIHLGELHAILRRQEDFYPFLKDNREKIEKILTFRIPYYVGPLARGNSRFAWMTRKSEETITPWNFEEVVDKGASAQSFIERMTNFDKNLPNEKVLPKHSLLYEYFTVYNELTKVKYVTEGMRKPAFLSGEQKKAIVDLLFKTNRKVTVKQLKEDYFKKIECFDSVEISGVEDRFNASLGTYHDLLKIIKDKDFLDNEENEDILEDIVLTLTLFEDREMIEERLKTYAHLFDDKVMKQLKRRRYTGWGRLSRKLINGIRDKQSGKTILDFLKSDGFANRNFMQLIHDDSLTFKEDIQKAQVSGQGDSLHEHIANLAGSPAIKKGILQTVKVVDELVKVMGRHKPENIVIEMARENQTTQKGQKNSRERMKRIEEGIKELGSQILKEHPVENTQLQNEKLYLYYLQNGRDMYVDQELDINRLSDYDVDHIVPQSFLKDDSIDNKVLTRSDKARGKSDNVPSEEVVKKMKNYWRQLLNAKLITQRKFDNLTKAERGGLSELDKAGFIKRQLVETRQITKHVAQILDSRMNTKYDENDKLIREVKVITLKSKLVSDFRKDFQFYKVREINNYHHAHDAYLNAVVGTALIKKYPKLESEFVYGDYKVYDVRKMIAKSEQEIGKATAKYFFYSNIMNFFKTEITLANGEIRKRPLIETNGETGEIVWDKGRDFATVRKVLSMPQVNIVKKTEVQTGGFSKESILPKRNSDKLIARKKDWDPKKYGGFDSPTVAYSVLVVAKVEKGKSKKLKSVKELLGITIMERSSFEKNPIDFLEAKGYKEVKKDLIIKLPKYSLFELENGRKRMLASAGELQKGNELALPSKYVNFLYLASHYEKLKGSPEDNEQKQLFVEQHKHYLDEIIEQISEFSKRVILADANLDKVLSAYNKHRDKPIREQAENIIHLFTLTNLGAPAAFKYFDTTIDRKRYTSTKEVLDATLIHQSITGLYETRIDLSQLGGDGGGGGGSSEAAAKGGTLNIEDEHRLHETSKEPDVSLGSTWLSDFPQAWAETGGMGLAVRQAPLIIPLKATSTPVSIKQYPMSQEARLGIKPHIQRLLDQGILVPCQSPWNTPLLPVKKPGTNDYRPVQDLREVNKRVEDIHPTVPNPYNLLSGLPPSHQWYTVLDLKDAFFCLRLHPTSQPLFAFEWRDPEMGISGQLTWTRLPQGFKNSPTLFNEALHRDLADFRIQHPDLILLQYVDDLLLAATSELDCQQGTRALLQTLGNLGYRASAKKAQICQKQVKYLGYLLKEGQRWLTEARKETVMGQPTPKTPRQLREFLGKAGFCRLFIPGFAEMAAPLYPLTKPGTLFNWGPDQQKAYQEIKQALLTAPALGLPDLTKPFELFVDEKQGYAKGVLTQKLGPWRRPVAYLSKKLDPVAAGWPPCLRMVAAIAVLTKDAGKLTMGQPLVILAPHAVEALVKQPPDRWLSNARMTHYQALLLDTDRVQFGPVVALNPATLLPLPEEGLQHNCLDILAEAHGTRPDLTDQPLPDADHTWYTDGSSLLQEGQRKAGAAVTTETEVIWAKALPAGTSAQRAELIALTQALKMAEGKKLNVYTDSRYAFATAHIHGEIYRRRGWLTSEGKEIKNKDEILALLKALFLPKRLSIIHCPGHQKGHSAEARGNRMADQAARKAAITETPDTSTLLAGKRTADGSEFEKRTADGSEFESPKKKAKVE

SEQ ID NO: 2832 - protein, 2091 aa, synthetic construct
  source 1..2091: note = Description of Artificial Sequence: Synthetic polypeptide
MPAAKRVKLDGGDKKYSIGLDIGTNSVGWAVITDEYKVPSKKFKVLGNTDRHSIKKNLIGALLFDSGETAEATRLKRTARRRYTRRKNRICYLQEIFSNEMAKVDDSFFHRLEESFLVEEDKKHERHPIFGNIVDEVAYHEKYPTIYHLRKKLVDSTDKADLRLIYLALAHMIKFRGHFLIEGDLNPDNSDVDKLFIQLVQTYNQLFEENPINASGVDAKAILSARLSKSRRLENLIAQLPGEKKNGLFGNLIALSLGLTPNFKSNFDLAEDAKLQLSKDTYDDDLDNLLAQIGDQYADLFLAAKNLSDAILLSDILRVNTEITKAPLSASMIKRYDEHHQDLTLLKALVRQQLPEKYKEIFFDQSKNGYAGYIDGGASQEEFYKFIKPILEKMDGTEELLVKLNREDLLRKQRTFDNGSIPHQIHLGELHAILRRQEDFYPFLKDNREKIEKILTFRIPYYVGPLARGNSRFAWMTRKSEETITPWNFEEVVDKGASAQSFIERMTNFDKNLPNEKVLPKHSLLYEYFTVYNELTKVKYVTEGMRKPAFLSGEQKKAIVDLLFKTNRKVTVKQLKEDYFKKIECFDSVEISGVEDRFNASLGTYHDLLKIIKDKDFLDNEENEDILEDIVLTLTLFEDREMIEERLKTYAHLFDDKVMKQLKRRRYTGWGRLSRKLINGIRDKQSGKTILDFLKSDGFANRNFMQLIHDDSLTFKEDIQKAQVSGQGDSLHEHIANLAGSPAIKKGILQTVKVVDELVKVMGRHKPENIVIEMARENQTTQKGQKNSRERMKRIEEGIKELGSQILKEHPVENTQLQNEKLYLYYLQNGRDMYVDQELDINRLSDYDVDHIVPQSFLKDDSIDNKVLTRSDKARGKSDNVPSEEVVKKMKNYWRQLLNAKLITQRKFDNLTKAERGGLSELDKAGFIKRQLVETRQITKHVAQILDSRMNTKYDENDKLIREVKVITLKSKLVSDFRKDFQFYKVREINNYHHAHDAYLNAVVGTALIKKYPKLESEFVYGDYKVYDVRKMIAKSEQEIGKATAKYFFYSNIMNFFKTEITLANGEIRKRPLIETNGETGEIVWDKGRDFATVRKVLSMPQVNIVKKTEVQTGGFSKESILPKRNSDKLIARKKDWDPKKYGGFDSPTVAYSVLVVAKVEKGKSKKLKSVKELLGITIMERSSFEKNPIDFLEAKGYKEVKKDLIIKLPKYSLFELENGRKRMLASAGELQKGNELALPSKYVNFLYLASHYEKLKGSPEDNEQKQLFVEQHKHYLDEIIEQISEFSKRVILADANLDKVLSAYNKHRDKPIREQAENIIHLFTLTNLGAPAAFKYFDTTIDRKRYTSTKEVLDATLIHQSITGLYETRIDLSQLGGDGGGSSGSSGGTLNIEDEHRLHETSKEPDVSLGSTWLSDFPQAWAETGGMGLAVRQAPLIIPLKATSTPVSIKQYPMSQEARLGIKPHIQRLLDQGILVPCQSPWNTPLLPVKKPGTNDYRPVQDLREVNKRVEDIHPTVPNPYNLLSGLPPSHQWYTVLDLKDAFFCLRLHPTSQPLFAFEWRDPEMGISGQLTWTRLPQGFKNSPTLFNEALHRDLADFRIQHPDLILLQYVDDLLLAATSELDCQQGTRALLQTLGNLGYRASAKKAQICQKQVKYLGYLLKEGQRWLTEARKETVMGQPTPKTPRQLREFLGKAGFCRLFIPGFAEMAAPLYPLTKPGTLFNWGPDQQKAYQEIKQALLTAPALGLPDLTKPFELFVDEKQGYAKGVLTQKLGPWRRPVAYLSKKLDPVAAGWPPCLRMVAAIAVLTKDAGKLTMGQPLVILAPHAVEALVKQPPDRWLSNARMTHYQALLLDTDRVQFGPVVALNPATLLPLPEEGLQHNCLDILAEAHGTRPDLTDQPLPDADHTWYTDGSSLLQEGQRKAGAAVTTETEVIWAKALPAGTSAQRAELIALTQALKMAEGKKLNVYTDSRYAFATAHIHGEIYRRRGWLTSEGKEIKNKDEILALLKALFLPKRLSIIHCPGHQKGHSAEARGNRMADQAARKAAITETPDTSTLLAGKRTADGSEFEKRTADGSEFESPKKKAKVE

SEQ ID NO: 2833 - protein, 2094 aa, synthetic construct
  source 1..2094: note = Description of Artificial Sequence: Synthetic polypeptide
MPAAKRVKLDGGDKKYSIGLDIGTNSVGWAVITDEYKVPSKKFKVLGNTDRHSIKKNLIGALLFDSGETAEATRLKRTARRRYTRRKNRICYLQEIFSNEMAKVDDSFFHRLEESFLVEEDKKHERHPIFGNIVDEVAYHEKYPTIYHLRKKLVDSTDKADLRLIYLALAHMIKFRGHFLIEGDLNPDNSDVDKLFIQLVQTYNQLFEENPINASGVDAKAILSARLSKSRRLENLIAQLPGEKKNGLFGNLIALSLGLTPNFKSNFDLAEDAKLQLSKDTYDDDLDNLLAQIGDQYADLFLAAKNLSDAILLSDILRVNTEITKAPLSASMIKRYDEHHQDLTLLKALVRQQLPEKYKEIFFDQSKNGYAGYIDGGASQEEFYKFIKPILEKMDGTEELLVKLNREDLLRKQRTFDNGSIPHQIHLGELHAILRRQEDFYPFLKDNREKIEKILTFRIPYYVGPLARGNSRFAWMTRKSEETITPWNFEEVVDKGASAQSFIERMTNFDKNLPNEKVLPKHSLLYEYFTVYNELTKVKYVTEGMRKPAFLSGEQKKAIVDLLFKTNRKVTVKQLKEDYFKKIECFDSVEISGVEDRFNASLGTYHDLLKIIKDKDFLDNEENEDILEDIVLTLTLFEDREMIEERLKTYAHLFDDKVMKQLKRRRYTGWGRLSRKLINGIRDKQSGKTILDFLKSDGFANRNFMQLIHDDSLTFKEDIQKAQVSGQGDSLHEHIANLAGSPAIKKGILQTVKVVDELVKVMGRHKPENIVIEMARENQTTQKGQKNSRERMKRIEEGIKELGSQILKEHPVENTQLQNEKLYLYYLQNGRDMYVDQELDINRLSDYDVDHIVPQSFLKDDSIDNKVLTRSDKARGKSDNVPSEEVVKKMKNYWRQLLNAKLITQRKFDNLTKAERGGLSELDKAGFIKRQLVETRQITKHVAQILDSRMNTKYDENDKLIREVKVITLKSKLVSDFRKDFQFYKVREINNYHHAHDAYLNAVVGTALIKKYPKLESEFVYGDYKVYDVRKMIAKSEQEIGKATAKYFFYSNIMNFFKTEITLANGEIRKRPLIETNGETGEIVWDKGRDFATVRKVLSMPQVNIVKKTEVQTGGFSKESILPKRNSDKLIARKKDWDPKKYGGFDSPTVAYSVLVVAKVEKGKSKKLKSVKELLGITIMERSSFEKNPIDFLEAKGYKEVKKDLIIKLPKYSLFELENGRKRMLASAGELQKGNELALPSKYVNFLYLASHYEKLKGSPEDNEQKQLFVEQHKHYLDEIIEQISEFSKRVILADANLDKVLSAYNKHRDKPIREQAENIIHLFTLTNLGAPAAFKYFDTTIDRKRYTSTKEVLDATLIHQSITGLYETRIDLSQLGGDGGPAPGGSGGGGGTLNIEDEHRLHETSKEPDVSLGSTWLSDFPQAWAETGGMGLAVRQAPLIIPLKATSTPVSIKQYPMSQEARLGIKPHIQRLLDQGILVPCQSPWNTPLLPVKKPGTNDYRPVQDLREVNKRVEDIHPTVPNPYNLLSGLPPSHQWYTVLDLKDAFFCLRLHPTSQPLFAFEWRDPEMGISGQLTWTRLPQGFKNSPTLFNEALHRDLADFRIQHPDLILLQYVDDLLLAATSELDCQQGTRALLQTLGNLGYRASAKKAQICQKQVKYLGYLLKEGQRWLTEARKETVMGQPTPKTPRQLREFLGKAGFCRLFIPGFAEMAAPLYPLTKPGTLFNWGPDQQKAYQEIKQALLTAPALGLPDLTKPFELFVDEKQGYAKGVLTQKLGPWRRPVAYLSKKLDPVAAGWPPCLRMVAAIAVLTKDAGKLTMGQPLVILAPHAVEALVKQPPDRWLSNARMTHYQALLLDTDRVQFGPVVALNPATLLPLPEEGLQHNCLDILAEAHGTRPDLTDQPLPDADHTWYTDGSSLLQEGQRKAGAAVTTETEVIWAKALPAGTSAQRAELIALTQALKMAEGKKLNVYTDSRYAFATAHIHGEIYRRRGWLTSEGKEIKNKDEILALLKALFLPKRLSIIHCPGHQKGHSAEARGNRMADQAARKAAITETPDTSTLLAGKRTADGSEFEKRTADGSEFESPKKKAKVE

SEQ ID NO: 2834 - protein, 2090 aa, synthetic construct
  source 1..2090: note = Description of Artificial Sequence: Synthetic polypeptide
MPAAKRVKLDGGDKKYSIGLDIGTNSVGWAVITDEYKVPSKKFKVLGNTDRHSIKKNLIGALLFDSGETAEATRLKRTARRRYTRRKNRICYLQEIFSNEMAKVDDSFFHRLEESFLVEEDKKHERHPIFGNIVDEVAYHEKYPTIYHLRKKLVDSTDKADLRLIYLALAHMIKFRGHFLIEGDLNPDNSDVDKLFIQLVQTYNQLFEENPINASGVDAKAILSARLSKSRRLENLIAQLPGEKKNGLFGNLIALSLGLTPNFKSNFDLAEDAKLQLSKDTYDDDLDNLLAQIGDQYADLFLAAKNLSDAILLSDILRVNTEITKAPLSASMIKRYDEHHQDLTLLKALVRQQLPEKYKEIFFDQSKNGYAGYIDGGASQEEFYKFIKPILEKMDGTEELLVKLNREDLLRKQRTFDNGSIPHQIHLGELHAILRRQEDFYPFLKDNREKIEKILTFRIPYYVGPLARGNSRFAWMTRKSEETITPWNFEEVVDKGASAQSFIERMTNFDKNLPNEKVLPKHSLLYEYFTVYNELTKVKYVTEGMRKPAFLSGEQKKAIVDLLFKTNRKVTVKQLKEDYFKKIECFDSVEISGVEDRFNASLGTYHDLLKIIKDKDFLDNEENEDILEDIVLTLTLFEDREMIEERLKTYAHLFDDKVMKQLKRRRYTGWGRLSRKLINGIRDKQSGKTILDFLKSDGFANRNFMQLIHDDSLTFKEDIQKAQVSGQGDSLHEHIANLAGSPAIKKGILQTVKVVDELVKVMGRHKPENIVIEMARENQTTQKGQKNSRERMKRIEEGIKELGSQILKEHPVENTQLQNEKLYLYYLQNGRDMYVDQELDINRLSDYDVDHIVPQSFLKDDSIDNKVLTRSDKARGKSDNVPSEEVVKKMKNYWRQLLNAKLITQRKFDNLTKAERGGLSELDKAGFIKRQLVETRQITKHVAQILDSRMNTKYDENDKLIREVKVITLKSKLVSDFRKDFQFYKVREINNYHHAHDAYLNAVVGTALIKKYPKLESEFVYGDYKVYDVRKMIAKSEQEIGKATAKYFFYSNIMNFFKTEITLANGEIRKRPLIETNGETGEIVWDKGRDFATVRKVLSMPQVNIVKKTEVQTGGFSKESILPKRNSDKLIARKKDWDPKKYGGFDSPTVAYSVLVVAKVEKGKSKKLKSVKELLGITIMERSSFEKNPIDFLEAKGYKEVKKDLIIKLPKYSLFELENGRKRMLASAGELQKGNELALPSKYVNFLYLASHYEKLKGSPEDNEQKQLFVEQHKHYLDEIIEQISEFSKRVILADANLDKVLSAYNKHRDKPIREQAENIIHLFTLTNLGAPAAFKYFDTTIDRKRYTSTKEVLDATLIHQSITGLYETRIDLSQLGGDGGGGGGGGGTLNIEDEHRLHETSKEPDVSLGSTWLSDFPQAWAETGGMGLAVRQAPLIIPLKATSTPVSIKQYPMSQEARLGIKPHIQRLLDQGILVPCQSPWNTPLLPVKKPGTNDYRPVQDLREVNKRVEDIHPTVPNPYNLLSGLPPSHQWYTVLDLKDAFFCLRLHPTSQPLFAFEWRDPEMGISGQLTWTRLPQGFKNSPTLFNEALHRDLADFRIQHPDLILLQYVDDLLLAATSELDCQQGTRALLQTLGNLGYRASAKKAQICQKQVKYLGYLLKEGQRWLTEARKETVMGQPTPKTPRQLREFLGKAGFCRLFIPGFAEMAAPLYPLTKPGTLFNWGPDQQKAYQEIKQALLTAPALGLPDLTKPFELFVDEKQGYAKGVLTQKLGPWRRPVAYLSKKLDPVAAGWPPCLRMVAAIAVLTKDAGKLTMGQPLVILAPHAVEALVKQPPDRWLSNARMTHYQALLLDTDRVQFGPVVALNPATLLPLPEEGLQHNCLDILAEAHGTRPDLTDQPLPDADHTWYTDGSSLLQEGQRKAGAAVTTETEVIWAKALPAGTSAQRAELIALTQALKMAEGKKLNVYTDSRYAFATAHIHGEIYRRRGWLTSEGKEIKNKDEILALLKALFLPKRLSIIHCPGHQKGHSAEARGNRMADQAARKAAITETPDTSTLLAGKRTADGSEFEKRTADGSEFESPKKKAKVE

SEQ ID NO: 2835 - protein, 2094 aa, synthetic construct
  source 1..2094: note = Description of Artificial Sequence: Synthetic polypeptide
MPAAKRVKLDGGDKKYSIGLDIGTNSVGWAVITDEYKVPSKKFKVLGNTDRHSIKKNLIGALLFDSGETAEATRLKRTARRRYTRRKNRICYLQEIFSNEMAKVDDSFFHRLEESFLVEEDKKHERHPIFGNIVDEVAYHEKYPTIYHLRKKLVDSTDKADLRLIYLALAHMIKFRGHFLIEGDLNPDNSDVDKLFIQLVQTYNQLFEENPINASGVDAKAILSARLSKSRRLENLIAQLPGEKKNGLFGNLIALSLGLTPNFKSNFDLAEDAKLQLSKDTYDDDLDNLLAQIGDQYADLFLAAKNLSDAILLSDILRVNTEITKAPLSASMIKRYDEHHQDLTLLKALVRQQLPEKYKEIFFDQSKNGYAGYIDGGASQEEFYKFIKPILEKMDGTEELLVKLNREDLLRKQRTFDNGSIPHQIHLGELHAILRRQEDFYPFLKDNREKIEKILTFRIPYYVGPLARGNSRFAWMTRKSEETITPWNFEEVVDKGASAQSFIERMTNFDKNLPNEKVLPKHSLLYEYFTVYNELTKVKYVTEGMRKPAFLSGEQKKAIVDLLFKTNRKVTVKQLKEDYFKKIECFDSVEISGVEDRFNASLGTYHDLLKIIKDKDFLDNEENEDILEDIVLTLTLFEDREMIEERLKTYAHLFDDKVMKQLKRRRYTGWGRLSRKLINGIRDKQSGKTILDFLKSDGFANRNFMQLIHDDSLTFKEDIQKAQVSGQGDSLHEHIANLAGSPAIKKGILQTVKVVDELVKVMGRHKPENIVIEMARENQTTQKGQKNSRERMKRIEEGIKELGSQILKEHPVENTQLQNEKLYLYYLQNGRDMYVDQELDINRLSDYDVDHIVPQSFLKDDSIDNKVLTRSDKARGKSDNVPSEEVVKKMKNYWRQLLNAKLITQRKFDNLTKAERGGLSELDKAGFIKRQLVETRQITKHVAQILDSRMNTKYDENDKLIREVKVITLKSKLVSDFRKDFQFYKVREINNYHHAHDAYLNAVVGTALIKKYPKLESEFVYGDYKVYDVRKMIAKSEQEIGKATAKYFFYSNIMNFFKTEITLANGEIRKRPLIETNGETGEIVWDKGRDFATVRKVLSMPQVNIVKKTEVQTGGFSKESILPKRNSDKLIARKKDWDPKKYGGFDSPTVAYSVLVVAKVEKGKSKKLKSVKELLGITIMERSSFEKNPIDFLEAKGYKEVKKDLIIKLPKYSLFELENGRKRMLASAGELQKGNELALPSKYVNFLYLASHYEKLKGSPEDNEQKQLFVEQHKHYLDEIIEQISEFSKRVILADANLDKVLSAYNKHRDKPIREQAENIIHLFTLTNLGAPAAFKYFDTTIDRKRYTSTKEVLDATLIHQSITGLYETRIDLSQLGGDGGGSSPAPGGGGGTLNIEDEHRLHETSKEPDVSLGSTWLSDFPQAWAETGGMGLAVRQAPLIIPLKATSTPVSIKQYPMSQEARLGIKPHIQRLLDQGILVPCQSPWNTPLLPVKKPGTNDYRPVQDLREVNKRVEDIHPTVPNPYNLLSGLPPSHQWYTVLDLKDAFFCLRLHPTSQPLFAFEWRDPEMGISGQLTWTRLPQGFKNSPTLFNEALHRDLADFRIQHPDLILLQYVDDLLLAATSELDCQQGTRALLQTLGNLGYRASAKKAQICQKQVKYLGYLLKEGQRWLTEARKETVMGQPTPKTPRQLREFLGKAGFCRLFIPGFAEMAAPLYPLTKPGTLFNWGPDQQKAYQEIKQALLTAPALGLPDLTKPFELFVDEKQGYAKGVLTQKLGPWRRPVAYLSKKLDPVAAGWPPCLRMVAAIAVLTKDAGKLTMGQPLVILAPHAVEALVKQPPDRWLSNARMTHYQALLLDTDRVQFGPVVALNPATLLPLPEEGLQHNCLDILAEAHGTRPDLTDQPLPDADHTWYTDGSSLLQEGQRKAGAAVTTETEVIWAKALPAGTSAQRAELIALTQALKMAEGKKLNVYTDSRYAFATAHIHGEIYRRRGWLTSEGKEIKNKDEILALLKALFLPKRLSIIHCPGHQKGHSAEARGNRMADQAARKAAITETPDTSTLLAGKRTADGSEFEKRTADGSEFESPKKKAKVE

SEQ ID NO: 2836 - protein, 2100 aa, synthetic construct
  source 1..2100: note = Description of Artificial Sequence: Synthetic polypeptide
MPAAKRVKLDGGDKKYSIGLDIGTNSVGWAVITDEYKVPSKKFKVLGNTDRHSIKKNLIGALLFDSGETAEATRLKRTARRRYTRRKNRICYLQEIFSNEMAKVDDSFFHRLEESFLVEEDKKHERHPIFGNIVDEVAYHEKYPTIYHLRKKLVDSTDKADLRLIYLALAHMIKFRGHFLIEGDLNPDNSDVDKLFIQLVQTYNQLFEENPINASGVDAKAILSARLSKSRRLENLIAQLPGEKKNGLFGNLIALSLGLTPNFKSNFDLAEDAKLQLSKDTYDDDLDNLLAQIGDQYADLFLAAKNLSDAILLSDILRVNTEITKAPLSASMIKRYDEHHQDLTLLKALVRQQLPEKYKEIFFDQSKNGYAGYIDGGASQEEFYKFIKPILEKMDGTEELLVKLNREDLLRKQRTFDNGSIPHQIHLGELHAILRRQEDFYPFLKDNREKIEKILTFRIPYYVGPLARGNSRFAWMTRKSEETITPWNFEEVVDKGASAQSFIERMTNFDKNLPNEKVLPKHSLLYEYFTVYNELTKVKYVTEGMRKPAFLSGEQKKAIVDLLFKTNRKVTVKQLKEDYFKKIECFDSVEISGVEDRFNASLGTYHDLLKIIKDKDFLDNEENEDILEDIVLTLTLFEDREMIEERLKTYAHLFDDKVMKQLKRRRYTGWGRLSRKLINGIRDKQSGKTILDFLKSDGFANRNFMQLIHDDSLTFKEDIQKAQVSGQGDSLHEHIANLAGSPAIKKGILQTVKVVDELVKVMGRHKPENIVIEMARENQTTQKGQKNSRERMKRIEEGIKELGSQILKEHPVENTQLQNEKLYLYYLQNGRDMYVDQELDINRLSDYDVDHIVPQSFLKDDSIDNKVLTRSDKARGKSDNVPSEEVVKKMKNYWRQLLNAKLITQRKFDNLTKAERGGLSELDKAGFIKRQLVETRQITKHVAQILDSRMNTKYDENDKLIREVKVITLKSKLVSDFRKDFQFYKVREINNYHHAHDAYLNAVVGTALIKKYPKLESEFVYGDYKVYDVRKMIAKSEQEIGKATAKYFFYSNIMNFFKTEITLANGEIRKRPLIETNGETGEIVWDKGRDFATVRKVLSMPQVNIVKKTEVQTGGFSKESILPKRNSDKLIARKKDWDPKKYGGFDSPTVAYSVLVVAKVEKGKSKKLKSVKELLGITIMERSSFEKNPIDFLEAKGYKEVKKDLIIKLPKYSLFELENGRKRMLASAGELQKGNELALPSKYVNFLYLASHYEKLKGSPEDNEQKQLFVEQHKHYLDEIIEQISEFSKRVILADANLDKVLSAYNKHRDKPIREQAENIIHLFTLTNLGAPAAFKYFDTTIDRKRYTSTKEVLDATLIHQSITGLYETRIDLSQLGGDGGGGGGSEAAAKGGGGSGGTLNIEDEHRLHETSKEPDVSLGSTWLSDFPQAWAETGGMGLAVRQAPLIIPLKATSTPVSIKQYPMSQEARLGIKPHIQRLLDQGILVPCQSPWNTPLLPVKKPGTNDYRPVQDLREVNKRVEDIHPTVPNPYNLLSGLPPSHQWYTVLDLKDAFFCLRLHPTSQPLFAFEWRDPEMGISGQLTWTRLPQGFKNSPTLFNEALHRDLADFRIQHPDLILLQYVDDLLLAATSELDCQQGTRALLQTLGNLGYRASAKKAQICQKQVKYLGYLLKEGQRWLTEARKETVMGQPTPKTPRQLREFLGKAGFCRLFIPGFAEMAAPLYPLTKPGTLFNWGPDQQKAYQEIKQALLTAPALGLPDLTKPFELFVDEKQGYAKGVLTQKLGPWRRPVAYLSKKLDPVAAGWPPCLRMVAAIAVLTKDAGKLTMGQPLVILAPHAVEALVKQPPDRWLSNARMTHYQALLLDTDRVQFGPVVALNPATLLPLPEEGLQHNCLDILAEAHGTRPDLTDQPLPDADHTWYTDGSSLLQEGQRKAGAAVTTETEVIWAKALPAGTSAQRAELIALTQALKMAEGKKLNVYTDSRYAFATAHIHGEIYRRRGWLTSEGKEIKNKDEILALLKALFLPKRLSIIHCPGHQKGHSAEARGNRMADQAARKAAITETPDTSTLLAGKRTADGSEFEKRTADGSEFESPKKKAKVE

SEQ ID NO: 2837 - protein, 2091 aa, synthetic construct
  source 1..2091: note = Description of Artificial Sequence: Synthetic polypeptide
MPAAKRVKLDGGDKKYSIGLDIGTNSVGWAVITDEYKVPSKKFKVLGNTDRHSIKKNLIGALLFDSGETAEATRLKRTARRRYTRRKNRICYLQEIFSNEMAKVDDSFFHRLEESFLVEEDKKHERHPIFGNIVDEVAYHEKYPTIYHLRKKLVDSTDKADLRLIYLALAHMIKFRGHFLIEGDLNPDNSDVDKLFIQLVQTYNQLFEENPINASGVDAKAILSARLSKSRRLENLIAQLPGEKKNGLFGNLIALSLGLTPNFKSNFDLAEDAKLQLSKDTYDDDLDNLLAQIGDQYADLFLAAKNLSDAILLSDILRVNTEITKAPLSASMIKRYDEHHQDLTLLKALVRQQLPEKYKEIFFDQSKNGYAGYIDGGASQEEFYKFIKPILEKMDGTEELLVKLNREDLLRKQRTFDNGSIPHQIHLGELHAILRRQEDFYPFLKDNREKIEKILTFRIPYYVGPLARGNSRFAWMTRKSEETITPWNFEEVVDKGASAQSFIERMTNFDKNLPNEKVLPKHSLLYEYFTVYNELTKVKYVTEGMRKPAFLSGEQKKAIVDLLFKTNRKVTVKQLKEDYFKKIECFDSVEISGVEDRFNASLGTYHDLLKIIKDKDFLDNEENEDILEDIVLTLTLFEDREMIEERLKTYAHLFDDKVMKQLKRRRYTGWGRLSRKLINGIRDKQSGKTILDFLKSDGFANRNFMQLIHDDSLTFKEDIQKAQVSGQGDSLHEHIANLAGSPAIKKGILQTVKVVDELVKVMGRHKPENIVIEMARENQTTQKGQKNSRERMKRIEEGIKELGSQILKEHPVENTQLQNEKLYLYYLQNGRDMYVDQELDINRLSDYDVDHIVPQSFLKDDSIDNKVLTRSDKARGKSDNVPSEEVVKKMKNYWRQLLNAKLITQRKFDNLTKAERGGLSELDKAGFIKRQLVETRQITKHVAQILDSRMNTKYDENDKLIREVKVITLKSKLVSDFRKDFQFYKVREINNYHHAHDAYLNAVVGTALIKKYPKLESEFVYGDYKVYDVRKMIAKSEQEIGKATAKYFFYSNIMNFFKTEITLANGEIRKRPLIETNGETGEIVWDKGRDFATVRKVLSMPQVNIVKKTEVQTGGFSKESILPKRNSDKLIARKKDWDPKKYGGFDSPTVAYSVLVVAKVEKGKSKKLKSVKELLGITIMERSSFEKNPIDFLEAKGYKEVKKDLIIKLPKYSLFELENGRKRMLASAGELQKGNELALPSKYVNFLYLASHYEKLKGSPEDNEQKQLFVEQHKHYLDEIIEQISEFSKRVILADANLDKVLSAYNKHRDKPIREQAENIIHLFTLTNLGAPAAFKYFDTTIDRKRYTSTKEVLDATLIHQSITGLYETRIDLSQLGGDGGPAPGGGGGTLNIEDEHRLHETSKEPDVSLGSTWLSDFPQAWAETGGMGLAVRQAPLIIPLKATSTPVSIKQYPMSQEARLGIKPHIQRLLDQGILVPCQSPWNTPLLPVKKPGTNDYRPVQDLREVNKRVEDIHPTVPNPYNLLSGLPPSHQWYTVLDLKDAFFCLRLHPTSQPLFAFEWRDPEMGISGQLTWTRLPQGFKNSPTLFNEALHRDLADFRIQHPDLILLQYVDDLLLAATSELDCQQGTRALLQTLGNLGYRASAKKAQICQKQVKYLGYLLKEGQRWLTEARKETVMGQPTPKTPRQLREFLGKAGFCRLFIPGFAEMAAPLYPLTKPGTLFNWGPDQQKAYQEIKQALLTAPALGLPDLTKPFELFVDEKQGYAKGVLTQKLGPWRRPVAYLSKKLDPVAAGWPPCLRMVAAIAVLTKDAGKLTMGQPLVILAPHAVEALVKQPPDRWLSNARMTHYQALLLDTDRVQFGPVVALNPATLLPLPEEGLQHNCLDILAEAHGTRPDLTDQPLPDADHTWYTDGSSLLQEGQRKAGAAVTTETEVIWAKALPAGTSAQRAELIALTQALKMAEGKKLNVYTDSRYAFATAHIHGEIYRRRGWLTSEGKEIKNKDEILALLKALFLPKRLSIIHCPGHQKGHSAEARGNRMADQAARKAAITETPDTSTLLAGKRTADGSEFEKRTADGSEFESPKKKAKVE

SEQ ID NO: 2838 - protein, 2096 aa, synthetic construct
  source 1..2096: note = Description of Artificial Sequence: Synthetic polypeptide
MPAAKRVKLDGGDKKYSIGLDIGTNSVGWAVITDEYKVPSKKFKVLGNTDRHSIKKNLIGALLFDSGETAEATRLKRTARRRYTRRKNRICYLQEIFSNEMAKVDDSFFHRLEESFLVEEDKKHERHPIFGNIVDEVAYHEKYPTIYHLRKKLVDSTDKADLRLIYLALAHMIKFRGHFLIEGDLNPDNSDVDKLFIQLVQTYNQLFEENPINASGVDAKAILSARLSKSRRLENLIAQLPGEKKNGLFGNLIALSLGLTPNFKSNFDLAEDAKLQLSKDTYDDDLDNLLAQIGDQYADLFLAAKNLSDAILLSDILRVNTEITKAPLSASMIKRYDEHHQDLTLLKALVRQQLPEKYKEIFFDQSKNGYAGYIDGGASQEEFYKFIKPILEKMDGTEELLVKLNREDLLRKQRTFDNGSIPHQIHLGELHAILRRQEDFYPFLKDNREKIEKILTFRIPYYVGPLARGNSRFAWMTRKSEETITPWNFEEVVDKGASAQSFIERMTNFDKNLPNEKVLPKHSLLYEYFTVYNELTKVKYVTEGMRKPAFLSGEQKKAIVDLLFKTNRKVTVKQLKEDYFKKIECFDSVEISGVEDRFNASLGTYHDLLKIIKDKDFLDNEENEDILEDIVLTLTLFEDREMIEERLKTYAHLFDDKVMKQLKRRRYTGWGRLSRKLINGIRDKQSGKTILDFLKSDGFANRNFMQLIHDDSLTFKEDIQKAQVSGQGDSLHEHIANLAGSPAIKKGILQTVKVVDELVKVMGRHKPENIVIEMARENQTTQKGQKNSRERMKRIEEGIKELGSQILKEHPVENTQLQNEKLYLYYLQNGRDMYVDQELDINRLSDYDVDHIVPQSFLKDDSIDNKVLTRSDKARGKSDNVPSEEVVKKMKNYWRQLLNAKLITQRKFDNLTKAERGGLSELDKAGFIKRQLVETRQITKHVAQILDSRMNTKYDENDKLIREVKVITLKSKLVSDFRKDFQFYKVREINNYHHAHDAYLNAVVGTALIKKYPKLESEFVYGDYKVYDVRKMIAKSEQEIGKATAKYFFYSNIMNFFKTEITLANGEIRKRPLIETNGETGEIVWDKGRDFATVRKVLSMPQVNIVKKTEVQTGGFSKESILPKRNSDKLIARKKDWDPKKYGGFDSPTVAYSVLVVAKVEKGKSKKLKSVKELLGITIMERSSFEKNPIDFLEAKGYKEVKKDLIIKLPKYSLFELENGRKRMLASAGELQKGNELALPSKYVNFLYLASHYEKLKGSPEDNEQKQLFVEQHKHYLDEIIEQISEFSKRVILADANLDKVLSAYNKHRDKPIREQAENIIHLFTLTNLGAPAAFKYFDTTIDRKRYTSTKEVLDATLIHQSITGLYETRIDLSQLGGDGGEAAAKPAPGGGGGTLNIEDEHRLHETSKEPDVSLGSTWLSDFPQAWAETGGMGLAVRQAPLIIPLKATSTPVSIKQYPMSQEARLGIKPHIQRLLDQGILVPCQSPWNTPLLPVKKPGTNDYRPVQDLREVNKRVEDIHPTVPNPYNLLSGLPPSHQWYTVLDLKDAFFCLRLHPTSQPLFAFEWRDPEMGISGQLTWTRLPQGFKNSPTLFNEALHRDLADFRIQHPDLILLQYVDDLLLAATSELDCQQGTRALLQTLGNLGYRASAKKAQICQKQVKYLGYLLKEGQRWLTEARKETVMGQPTPKTPRQLREFLGKAGFCRLFIPGFAEMAAPLYPLTKPGTLFNWGPDQQKAYQEIKQALLTAPALGLPDLTKPFELFVDEKQGYAKGVLTQKLGPWRRPVAYLSKKLDPVAAGWPPCLRMVAAIAVLTKDAGKLTMGQPLVILAPHAVEALVKQPPDRWLSNARMTHYQALLLDTDRVQFGPVVALNPATLLPLPEEGLQHNCLDILAEAHGTRPDLTDQPLPDADHTWYTDGSSLLQEGQRKAGAAVTTETEVIWAKALPAGTSAQRAELIALTQALKMAEGKKLNVYTDSRYAFATAHIHGEIYRRRGWLTSEGKEIKNKDEILALLKALFLPKRLSIIHCPGHQKGHSAEARGNRMADQAARKAAITETPDTSTLLAGKRTADGSEFEKRTADGSEFESPKKKAKVE

SEQ ID NO: 2839 - protein, 2096 aa, synthetic construct
  source 1..2096: note = Description of Artificial Sequence: Synthetic polypeptide
MPAAKRVKLDGGDKKYSIGLDIGTNSVGWAVITDEYKVPSKKFKVLGNTDRHSIKKNLIGALLFDSGETAEATRLKRTARRRYTRRKNRICYLQEIFSNEMAKVDDSFFHRLEESFLVEEDKKHERHPIFGNIVDEVAYHEKYPTIYHLRKKLVDSTDKADLRLIYLALAHMIKFRGHFLIEGDLNPDNSDVDKLFIQLVQTYNQLFEENPINASGVDAKAILSARLSKSRRLENLIAQLPGEKKNGLFGNLIALSLGLTPNFKSNFDLAEDAKLQLSKDTYDDDLDNLLAQIGDQYADLFLAAKNLSDAILLSDILRVNTEITKAPLSASMIKRYDEHHQDLTLLKALVRQQLPEKYKEIFFDQSKNGYAGYIDGGASQEEFYKFIKPILEKMDGTEELLVKLNREDLLRKQRTFDNGSIPHQIHLGELHAILRRQEDFYPFLKDNREKIEKILTFRIPYYVGPLARGNSRFAWMTRKSEETITPWNFEEVVDKGASAQSFIERMTNFDKNLPNEKVLPKHSLLYEYFTVYNELTKVKYVTEGMRKPAFLSGEQKKAIVDLLFKTNRKVTVKQLKEDYFKKIECFDSVEISGVEDRFNASLGTYHDLLKIIKDKDFLDNEENEDILEDIVLTLTLFEDREMIEERLKTYAHLFDDKVMKQLKRRRYTGWGRLSRKLINGIRDKQSGKTILDFLKSDGFANRNFMQLIHDDSLTFKEDIQKAQVSGQGDSLHEHIANLAGSPAIKKGILQTVKVVDELVKVMGRHKPENIVIEMARENQTTQKGQKNSRERMKRIEEGIKELGSQILKEHPVENTQLQNEKLYLYYLQNGRDMYVDQELDINRLSDYDVDHIVPQSFLKDDSIDNKVLTRSDKARGKSDNVPSEEVVKKMKNYWRQLLNAKLITQRKFDNLTKAERGGLSELDKAGFIKRQLVETRQITKHVAQILDSRMNTKYDENDKLIREVKVITLKSKLVSDFRKDFQFYKVREINNYHHAHDAYLNAVVGTALIKKYPKLESEFVYGDYKVYDVRKMIAKSEQEIGKATAKYFFYSNIMNFFKTEITLANGEIRKRPLIETNGETGEIVWDKGRDFATVRKVLSMPQVNIVKKTEVQTGGFSKESILPKRNSDKLIARKKDWDPKKYGGFDSPTVAYSVLVVAKVEKGKSKKLKSVKELLGITIMERSSFEKNPIDFLEAKGYKEVKKDLIIKLPKYSLFELENGRKRMLASAGELQKGNELALPSKYVNFLYLASHYEKLKGSPEDNEQKQLFVEQHKHYLDEIIEQISEFSKRVILADANLDKVLSAYNKHRDKPIREQAENIIHLFTLTNLGAPAAFKYFDTTIDRKRYTSTKEVLDATLIHQSITGLYETRIDLSQLGGDGGGSSPAPEAAAKGGTLNIEDEHRLHETSKEPDVSLGSTWLSDFPQAWAETGGMGLAVRQAPLIIPLKATSTPVSIKQYPMSQEARLGIKPHIQRLLDQGILVPCQSPWNTPLLPVKKPGTNDYRPVQDLREVNKRVEDIHPTVPNPYNLLSGLPPSHQWYTVLDLKDAFFCLRLHPTSQPLFAFEWRDPEMGISGQLTWTRLPQGFKNSPTLFNEALHRDLADFRIQHPDLILLQYVDDLLLAATSELDCQQGTRALLQTLGNLGYRASAKKAQICQKQVKYLGYLLKEGQRWLTEARKETVMGQPTPKTPRQLREFLGKAGFCRLFIPGFAEMAAPLYPLTKPGTLFNWGPDQQKAYQEIKQALLTAPALGLPDLTKPFELFVDEKQGYAKGVLTQKLGPWRRPVAYLSKKLDPVAAGWPPCLRMVAAIAVLTKDAGKLTMGQPLVILAPHAVEALVKQPPDRWLSNARMTHYQALLLDTDRVQFGPVVALNPATLLPLPEEGLQHNCLDILAEAHGTRPDLTDQPLPDADHTWYTDGSSLLQEGQRKAGAAVTTETEVIWAKALPAGTSAQRAELIALTQALKMAEGKKLNVYTDSRYAFATAHIHGEIYRRRGWLTSEGKEIKNKDEILALLKALFLPKRLSIIHCPGHQKGHSAEARGNRMADQAARKAAITETPDTSTLLAGKRTADGSEFEKRTADGSEFESPKKKAKVE

SEQ ID NO: 2840 - protein, 2094 aa, synthetic construct
  source 1..2094: note = Description of Artificial Sequence: Synthetic polypeptide
MPAAKRVKLDGGDKKYSIGLDIGTNSVGWAVITDEYKVPSKKFKVLGNTDRHSIKKNLIGALLFDSGETAEATRLKRTARRRYTRRKNRICYLQEIFSNEMAKVDDSFFHRLEESFLVEEDKKHERHPIFGNIVDEVAYHEKYPTIYHLRKKLVDSTDKADLRLIYLALAHMIKFRGHFLIEGDLNPDNSDVDKLFIQLVQTYNQLFEENPINASGVDAKAILSARLSKSRRLENLIAQLPGEKKNGLFGNLIALSLGLTPNFKSNFDLAEDAKLQLSKDTYDDDLDNLLAQIGDQYADLFLAAKNLSDAILLSDILRVNTEITKAPLSASMIKRYDEHHQDLTLLKALVRQQLPEKYKEIFFDQSKNGYAGYIDGGASQEEFYKFIKPILEKMDGTEELLVKLNREDLLRKQRTFDNGSIPHQIHLGELHAILRRQEDFYPFLKDNREKIEKILTFRIPYYVGPLARGNSRFAWMTRKSEETITPWNFEEVVDKGASAQSFIERMTNFDKNLPNEKVLPKHSLLYEYFTVYNELTKVKYVTEGMRKPAFLSGEQKKAIVDLLFKTNRKVTVKQLKEDYFKKIECFDSVEISGVEDRFNASLGTYHDLLKIIKDKDFLDNEENEDILEDIVLTLTLFEDREMIEERLKTYAHLFDDKVMKQLKRRRYTGWGRLSRKLINGIRDKQSGKTILDFLKSDGFANRNFMQLIHDDSLTFKEDIQKAQVSGQGDSLHEHIANLAGSPAIKKGILQTVKVVDELVKVMGRHKPENIVIEMARENQTTQKGQKNSRERMKRIEEGIKELGSQILKEHPVENTQLQNEKLYLYYLQNGRDMYVDQELDINRLSDYDVDHIVPQSFLKDDSIDNKVLTRSDKARGKSDNVPSEEVVKKMKNYWRQLLNAKLITQRKFDNLTKAERGGLSELDKAGFIKRQLVETRQITKHVAQILDSRMNTKYDENDKLIREVKVITLKSKLVSDFRKDFQFYKVREINNYHHAHDAYLNAVVGTALIKKYPKLESEFVYGDYKVYDVRKMIAKSEQEIGKATAKYFFYSNIMNFFKTEITLANGEIRKRPLIETNGETGEIVWDKGRDFATVRKVLSMPQVNIVKKTEVQTGGFSKESILPKRNSDKLIARKKDWDPKKYGGFDSPTVAYSVLVVAKVEKGKSKKLKSVKELLGITIMERSSFEKNPIDFLEAKGYKEVKKDLIIKLPKYSLFELENGRKRMLASAGELQKGNELALPSKYVNFLYLASHYEKLKGSPEDNEQKQLFVEQHKHYLDEIIEQISEFSKRVILADANLDKVLSAYNKHRDKPIREQAENIIHLFTLTNLGAPAAFKYFDTTIDRKRYTSTKEVLDATLIHQSITGLYETRIDLSQLGGDGGGGGGGSPAPGGTLNIEDEHRLHETSKEPDVSLGSTWLSDFPQAWAETGGMGLAVRQAPLIIPLKATSTPVSIKQYPMSQEARLGIKPHIQRLLDQGILVPCQSPWNTPLLPVKKPGTNDYRPVQDLREVNKRVEDIHPTVPNPYNLLSGLPPSHQWYTVLDLKDAFFCLRLHPTSQPLFAFEWRDPEMGISGQLTWTRLPQGFKNSPTLFNEALHRDLADFRIQHPDLILLQYVDDLLLAATSELDCQQGTRALLQTLGNLGYRASAKKAQICQKQVKYLGYLLKEGQRWLTEARKETVMGQPTPKTPRQLREFLGKAGFCRLFIPGFAEMAAPLYPLTKPGTLFNWGPDQQKAYQEIKQALLTAPALGLPDLTKPFELFVDEKQGYAKGVLTQKLGPWRRPVAYLSKKLDPVAAGWPPCLRMVAAIAVLTKDAGKLTMGQPLVILAPHAVEALVKQPPDRWLSNARMTHYQALLLDTDRVQFGPVVALNPATLLPLPEEGLQHNCLDILAEAHGTRPDLTDQPLPDADHTWYTDGSSLLQEGQRKAGAAVTTETEVIWAKALPAGTSAQRAELIALTQALKMAEGKKLNVYTDSRYAFATAHIHGEIYRRRGWLTSEGKEIKNKDEILALLKALFLPKRLSIIHCPGHQKGHSAEARGNRMADQAARKAAITETPDTSTLLAGKRTADGSEFEKRTADGSEFESPKKKAKVE

SEQ ID NO: 2841 - protein, 2094 aa, synthetic construct
  source 1..2094: note = Description of Artificial Sequence: Synthetic polypeptide
MPAAKRVKLDGGDKKYSIGLDIGTNSVGWAVITDEYKVPSKKFKVLGNTDRHSIKKNLIGALLFDSGETAEATRLKRTARRRYTRRKNRICYLQEIFSNEMAKVDDSFFHRLEESFLVEEDKKHERHPIFGNIVDEVAYHEKYPTIYHLRKKLVDSTDKADLRLIYLALAHMIKFRGHFLIEGDLNPDNSDVDKLFIQLVQTYNQLFEENPINASGVDAKAILSARLSKSRRLENLIAQLPGEKKNGLFGNLIALSLGLTPNFKSNFDLAEDAKLQLSKDTYDDDLDNLLAQIGDQYADLFLAAKNLSDAILLSDILRVNTEITKAPLSASMIKRYDEHHQDLTLLKALVRQQLPEKYKEIFFDQSKNGYAGYIDGGASQEEFYKFIKPILEKMDGTEELLVKLNREDLLRKQRTFDNGSIPHQIHLGELHAILRRQEDFYPFLKDNREKIEKILTFRIPYYVGPLARGNSRFAWMTRKSEETITPWNFEEVVDKGASAQSFIERMTNFDKNLPNEKVLPKHSLLYEYFTVYNELTKVKYVTEGMRKPAFLSGEQKKAIVDLLFKTNRKVTVKQLKEDYFKKIECFDSVEISGVEDRFNASLGTYHDLLKIIKDKDFLDNEENEDILEDIVLTLTLFEDREMIEERLKTYAHLFDDKVMKQLKRRRYTGWGRLSRKLINGIRDKQSGKTILDFLKSDGFANRNFMQLIHDDSLTFKEDIQKAQVSGQGDSLHEHIANLAGSPAIKKGILQTVKVVDELVKVMGRHKPENIVIEMARENQTTQKGQKNSRERMKRIEEGIKELGSQILKEHPVENTQLQNEKLYLYYLQNGRDMYVDQELDINRLSDYDVDHIVPQSFLKDDSIDNKVLTRSDKARGKSDNVPSEEVVKKMKNYWRQLLNAKLITQRKFDNLTKAERGGLSELDKAGFIKRQLVETRQITKHVAQILDSRMNTKYDENDKLIREVKVITLKSKLVSDFRKDFQFYKVREINNYHHAHDAYLNAVVGTALIKKYPKLESEFVYGDYKVYDVRKMIAKSEQEIGKATAKYFFYSNIMNFFKTEITLANGEIRKRPLIETNGETGEIVWDKGRDFATVRKVLSMPQVNIVKKTEVQTGGFSKESILPKRNSDKLIARKKDWDPKKYGGFDSPTVAYSVLVVAKVEKGKSKKLKSVKELLGITIMERSSFEKNPIDFLEAKGYKEVKKDLIIKLPKYSLFELENGRKRMLASAGELQKGNELALPSKYVNFLYLASHYEKLKGSPEDNEQKQLFVEQHKHYLDEIIEQISEFSKRVILADANLDKVLSAYNKHRDKPIREQAENIIHLFTLTNLGAPAAFKYFDTTIDRKRYTSTKEVLDATLIHQSITGLYETRIDLSQLGGDGGGGGPAPGSSGGTLNIEDEHRLHETSKEPDVSLGSTWLSDFPQAWAETGGMGLAVRQAPLIIPLKATSTPVSIKQYPMSQEARLGIKPHIQRLLDQGILVPCQSPWNTPLLPVKKPGTNDYRPVQDLREVNKRVEDIHPTVPNPYNLLSGLPPSHQWYTVLDLKDAFFCLRLHPTSQPLFAFEWRDPEMGISGQLTWTRLPQGFKNSPTLFNEALHRDLADFRIQHPDLILLQYVDDLLLAATSELDCQQGTRALLQTLGNLGYRASAKKAQICQKQVKYLGYLLKEGQRWLTEARKETVMGQPTPKTPRQLREFLGKAGFCRLFIPGFAEMAAPLYPLTKPGTLFNWGPDQQKAYQEIKQALLTAPALGLPDLTKPFELFVDEKQGYAKGVLTQKLGPWRRPVAYLSKKLDPVAAGWPPCLRMVAAIAVLTKDAGKLTMGQPLVILAPHAVEALVKQPPDRWLSNARMTHYQALLLDTDRVQFGPVVALNPATLLPLPEEGLQHNCLDILAEAHGTRPDLTDQPLPDADHTWYTDGSSLLQEGQRKAGAAVTTETEVIWAKALPAGTSAQRAELIALTQALKMAEGKKLNVYTDSRYAFATAHIHGEIYRRRGWLTSEGKEIKNKDEILALLKALFLPKRLSIIHCPGHQKGHSAEARGNRMADQAARKAAITETPDTSTLLAGKRTADGSEFEKRTADGSEFESPKKKAKVE

SEQ ID NO: 2842 - protein, 2096 aa, synthetic construct
  source 1..2096: note = Description of Artificial Sequence: Synthetic polypeptide
MPAAKRVKLDGGDKKYSIGLDIGTNSVGWAVITDEYKVPSKKFKVLGNTDRHSIKKNLIGALLFDSGETAEATRLKRTARRRYTRRKNRICYLQEIFSNEMAKVDDSFFHRLEESFLVEEDKKHERHPIFGNIVDEVAYHEKYPTIYHLRKKLVDSTDKADLRLIYLALAHMIKFRGHFLIEGDLNPDNSDVDKLFIQLVQTYNQLFEENPINASGVDAKAILSARLSKSRRLENLIAQLPGEKKNGLFGNLIALSLGLTPNFKSNFDLAEDAKLQLSKDTYDDDLDNLLAQIGDQYADLFLAAKNLSDAILLSDILRVNTEITKAPLSASMIKRYDEHHQDLTLLKALVRQQLPEKYKEIFFDQSKNGYAGYIDGGASQEEFYKFIKPILEKMDGTEELLVKLNREDLLRKQRTFDNGSIPHQIHLGELHAILRRQEDFYPFLKDNREKIEKILTFRIPYYVGPLARGNSRFAWMTRKSEETITPWNFEEVVDKGASAQSFIERMTNFDKNLPNEKVLPKHSLLYEYFTVYNELTKVKYVTEGMRKPAFLSGEQKKAIVDLLFKTNRKVTVKQLKEDYFKKIECFDSVEISGVEDRFNASLGTYHDLLKIIKDKDFLDNEENEDILEDIVLTLTLFEDREMIEERLKTYAHLFDDKVMKQLKRRRYTGWGRLSRKLINGIRDKQSGKTILDFLKSDGFANRNFMQLIHDDSLTFKEDIQKAQVSGQGDSLHEHIANLAGSPAIKKGILQTVKVVDELVKVMGRHKPENIVIEMARENQTTQKGQKNSRERMKRIEEGIKELGSQILKEHPVENTQLQNEKLYLYYLQNGRDMYVDQELDINRLSDYDVDHIVPQSFLKDDSIDNKVLTRSDKARGKSDNVPSEEVVKKMKNYWRQLLNAKLITQRKFDNLTKAERGGLSELDKAGFIKRQLVETRQITKHVAQILDSRMNTKYDENDKLIREVKVITLKSKLVSDFRKDFQFYKVREINNYHHAHDAYLNAVVGTALIKKYPKLESEFVYGDYKVYDVRKMIAKSEQEIGKATAKYFFYSNIMNFFKTEITLANGEIRKRPLIETNGETGEIVWDKGRDFATVRKVLSMPQVNIVKKTEVQTGGFSKESILPKRNSDKLIARKKDWDPKKYGGFDSPTVAYSVLVVAKVEKGKSKKLKSVKELLGITIMERSSFEKNPIDFLEAKGYKEVKKDLIIKLPKYSLFELENGRKRMLASAGELQKGNELALPSKYVNFLYLASHYEKLKGSPEDNEQKQLFVEQHKHYLDEIIEQISEFSKRVILADANLDKVLSAYNKHRDKPIREQAENIIHLFTLTNLGAPAAFKYFDTTIDRKRYTSTKEVLDATLIHQSITGLYETRIDLSQLGGDGGGGSGSSEAAAKGGTLNIEDEHRLHETSKEPDVSLGSTWLSDFPQAWAETGGMGLAVRQAPLIIPLKATSTPVSIKQYPMSQEARLGIKPHIQRLLDQGILVPCQSPWNTPLLPVKKPGTNDYRPVQDLREVNKRVEDIHPTVPNPYNLLSGLPPSHQWYTVLDLKDAFFCLRLHPTSQPLFAFEWRDPEMGISGQLTWTRLPQGFKNSPTLFNEALHRDLADFRIQHPDLILLQYVDDLLLAATSELDCQQGTRALLQTLGNLGYRASAKKAQICQKQVKYLGYLLKEGQRWLTEARKETVMGQPTPKTPRQLREFLGKAGFCRLFIPGFAEMAAPLYPLTKPGTLFNWGPDQQKAYQEIKQALLTAPALGLPDLTKPFELFVDEKQGYAKGVLTQKLGPWRRPVAYLSKKLDPVAAGWPPCLRMVAAIAVLTKDAGKLTMGQPLVILAPHAVEALVKQPPDRWLSNARMTHYQALLLDTDRVQFGPVVALNPATLLPLPEEGLQHNCLDILAEAHGTRPDLTDQPLPDADHTWYTDGSSLLQEGQRKAGAAVTTETEVIWAKALPAGTSAQRAELIALTQALKMAEGKKLNVYTDSRYAFATAHIHGEIYRRRGWLTSEGKEIKNKDEILALLKALFLPKRLSIIHCPGHQKGHSAEARGNRMADQAARKAAITETPDTSTLLAGKRTADGSEFEKRTADGSEFESPKKKAKVE

SEQ ID NO: 2843 - protein, 2096 aa, synthetic construct
  source 1..2096: note = Description of Artificial Sequence: Synthetic polypeptide
MPAAKRVKLDGGDKKYSIGLDIGTNSVGWAVITDEYKVPSKKFKVLGNTDRHSIKKNLIGALLFDSGETAEATRLKRTARRRYTRRKNRICYLQEIFSNEMAKVDDSFFHRLEESFLVEEDKKHERHPIFGNIVDEVAYHEKYPTIYHLRKKLVDSTDKADLRLIYLALAHMIKFRGHFLIEGDLNPDNSDVDKLFIQLVQTYNQLFEENPINASGVDAKAILSARLSKSRRLENLIAQLPGEKKNGLFGNLIALSLGLTPNFKSNFDLAEDAKLQLSKDTYDDDLDNLLAQIGDQYADLFLAAKNLSDAILLSDILRVNTEITKAPLSASMIKRYDEHHQDLTLLKALVRQQLPEKYKEIFFDQSKNGYAGYIDGGASQEEFYKFIKPILEKMDGTEELLVKLNREDLLRKQRTFDNGSIPHQIHLGELHAILRRQEDFYPFLKDNREKIEKILTFRIPYYVGPLARGNSRFAWMTRKSEETITPWNFEEVVDKGASAQSFIERMTNFDKNLPNEKVLPKHSLLYEYFTVYNELTKVKYVTEGMRKPAFLSGEQKKAIVDLLFKTNRKVTVKQLKEDYFKKIECFDSVEISGVEDRFNASLGTYHDLLKIIKDKDFLDNEENEDILEDIVLTLTLFEDREMIEERLKTYAHLFDDKVMKQLKRRRYTGWGRLSRKLINGIRDKQSGKTILDFLKSDGFANRNFMQLIHDDSLTFKEDIQKAQVSGQGDSLHEHIANLAGSPAIKKGILQTVKVVDELVKVMGRHKPENIVIEMARENQTTQKGQKNSRERMKRIEEGIKELGSQILKEHPVENTQLQNEKLYLYYLQNGRDMYVDQELDINRLSDYDVDHIVPQSFLKDDSIDNKVLTRSDKARGKSDNVPSEEVVKKMKNYWRQLLNAKLITQRKFDNLTKAERGGLSELDKAGFIKRQLVETRQITKHVAQILDSRMNTKYDENDKLIREVKVITLKSKLVSDFRKDFQFYKVREINNYHHAHDAYLNAVVGTALIKKYPKLESEFVYGDYKVYDVRKMIAKSEQEIGKATAKYFFYSNIMNFFKTEITLANGEIRKRPLIETNGETGEIVWDKGRDFATVRKVLSMPQVNIVKKTEVQTGGFSKESILPKRNSDKLIARKKDWDPKKYGGFDSPTVAYSVLVVAKVEKGKSKKLKSVKELLGITIMERSSFEKNPIDFLEAKGYKEVKKDLIIKLPKYSLFELENGRKRMLASAGELQKGNELALPSKYVNFLYLASHYEKLKGSPEDNEQKQLFVEQHKHYLDEIIEQISEFSKRVILADANLDKVLSAYNKHRDKPIREQAENIIHLFTLTNLGAPAAFKYFDTTIDRKRYTSTKEVLDATLIHQSITGLYETRIDLSQLGGDGGEAAAKGGGPAPGGTLNIEDEHRLHETSKEPDVSLGSTWLSDFPQAWAETGGMGLAVRQAPLIIPLKATSTPVSIKQYPMSQEARLGIKPHIQRLLDQGILVPCQSPWNTPLLPVKKPGTNDYRPVQDLREVNKRVEDIHPTVPNPYNLLSGLPPSHQWYTVLDLKDAFFCLRLHPTSQPLFAFEWRDPEMGISGQLTWTRLPQGFKNSPTLFNEALHRDLADFRIQHPDLILLQYVDDLLLAATSELDCQQGTRALLQTLGNLGYRASAKKAQICQKQVKYLGYLLKEGQRWLTEARKETVMGQPTPKTPRQLREFLGKAGFCRLFIPGFAEMAAPLYPLTKPGTLFNWGPDQQKAYQEIKQALLTAPALGLPDLTKPFELFVDEKQGYAKGVLTQKLGPWRRPVAYLSKKLDPVAAGWPPCLRMVAAIAVLTKDAGKLTMGQPLVILAPHAVEALVKQPPDRWLSNARMTHYQALLLDTDRVQFGPVVALNPATLLPLPEEGLQHNCLDILAEAHGTRPDLTDQPLPDADHTWYTDGSSLLQEGQRKAGAAVTTETEVIWAKALPAGTSAQRAELIALTQALKMAEGKKLNVYTDSRYAFATAHIHGEIYRRRGWLTSEGKEIKNKDEILALLKALFLPKRLSIIHCPGHQKGHSAEARGNRMADQAARKAAITETPDTSTLLAGKRTADGSEFEKRTADGSEFESPKKKAKVE

SEQ ID NO: 2844 - protein, 2105 aa, synthetic construct
  source 1..2105: note = Description of Artificial Sequence: Synthetic polypeptide
MPAAKRVKLDGGDKKYSIGLDIGTNSVGWAVITDEYKVPSKKFKVLGNTDRHSIKKNLIGALLFDSGETAEATRLKRTARRRYTRRKNRICYLQEIFSNEMAKVDDSFFHRLEESFLVEEDKKHERHPIFGNIVDEVAYHEKYPTIYHLRKKLVDSTDKADLRLIYLALAHMIKFRGHFLIEGDLNPDNSDVDKLFIQLVQTYNQLFEENPINASGVDAKAILSARLSKSRRLENLIAQLPGEKKNGLFGNLIALSLGLTPNFKSNFDLAEDAKLQLSKDTYDDDLDNLLAQIGDQYADLFLAAKNLSDAILLSDILRVNTEITKAPLSASMIKRYDEHHQDLTLLKALVRQQLPEKYKEIFFDQSKNGYAGYIDGGASQEEFYKFIKPILEKMDGTEELLVKLNREDLLRKQRTFDNGSIPHQIHLGELHAILRRQEDFYPFLKDNREKIEKILTFRIPYYVGPLARGNSRFAWMTRKSEETITPWNFEEVVDKGASAQSFIERMTNFDKNLPNEKVLPKHSLLYEYFTVYNELTKVKYVTEGMRKPAFLSGEQKKAIVDLLFKTNRKVTVKQLKEDYFKKIECFDSVEISGVEDRFNASLGTYHDLLKIIKDKDFLDNEENEDILEDIVLTLTLFEDREMIEERLKTYAHLFDDKVMKQLKRRRYTGWGRLSRKLINGIRDKQSGKTILDFLKSDGFANRNFMQLIHDDSLTFKEDIQKAQVSGQGDSLHEHIANLAGSPAIKKGILQTVKVVDELVKVMGRHKPENIVIEMARENQTTQKGQKNSRERMKRIEEGIKELGSQILKEHPVENTQLQNEKLYLYYLQNGRDMYVDQELDINRLSDYDVDHIVPQSFLKDDSIDNKVLTRSDKARGKSDNVPSEEVVKKMKNYWRQLLNAKLITQRKFDNLTKAERGGLSELDKAGFIKRQLVETRQITKHVAQILDSRMNTKYDENDKLIREVKVITLKSKLVSDFRKDFQFYKVREINNYHHAHDAYLNAVVGTALIKKYPKLESEFVYGDYKVYDVRKMIAKSEQEIGKATAKYFFYSNIMNFFKTEITLANGEIRKRPLIETNGETGEIVWDKGRDFATVRKVLSMPQVNIVKKTEVQTGGFSKESILPKRNSDKLIARKKDWDPKKYGGFDSPTVAYSVLVVAKVEKGKSKKLKSVKELLGITIMERSSFEKNPIDFLEAKGYKEVKKDLIIKLPKYSLFELENGRKRMLASAGELQKGNELALPSKYVNFLYLASHYEKLKGSPEDNEQKQLFVEQHKHYLDEIIEQISEFSKRVILADANLDKVLSAYNKHRDKPIREQAENIIHLFTLTNLGAPAAFKYFDTTIDRKRYTSTKEVLDATLIHQSITGLYETRIDLSQLGGDGGEAAAKEAAAKEAAAKEAAAKGGTLNIEDEHRLHETSKEPDVSLGSTWLSDFPQAWAETGGMGLAVRQAPLIIPLKATSTPVSIKQYPMSQEARLGIKPHIQRLLDQGILVPCQSPWNTPLLPVKKPGTNDYRPVQDLREVNKRVEDIHPTVPNPYNLLSGLPPSHQWYTVLDLKDAFFCLRLHPTSQPLFAFEWRDPEMGISGQLTWTRLPQGFKNSPTLFNEALHRDLADFRIQHPDLILLQYVDDLLLAATSELDCQQGTRALLQTLGNLGYRASAKKAQICQKQVKYLGYLLKEGQRWLTEARKETVMGQPTPKTPRQLREFLGKAGFCRLFIPGFAEMAAPLYPLTKPGTLFNWGPDQQKAYQEIKQALLTAPALGLPDLTKPFELFVDEKQGYAKGVLTQKLGPWRRPVAYLSKKLDPVAAGWPPCLRMVAAIAVLTKDAGKLTMGQPLVILAPHAVEALVKQPPDRWLSNARMTHYQALLLDTDRVQFGPVVALNPATLLPLPEEGLQHNCLDILAEAHGTRPDLTDQPLPDADHTWYTDGSSLLQEGQRKAGAAVTTETEVIWAKALPAGTSAQRAELIALTQALKMAEGKKLNVYTDSRYAFATAHIHGEIYRRRGWLTSEGKEIKNKDEILALLKALFLPKRLSIIHCPGHQKGHSAEARGNRMADQAARKAAITETPDTSTLLAGKRTADGSEFEKRTADGSEFESPKKKAKVE

SEQ ID NO: 2845 - protein, 2095 aa, synthetic construct
  source 1..2095: note = Description of Artificial Sequence: Synthetic polypeptide
MPAAKRVKLDGGDKKYSIGLDIGTNSVGWAVITDEYKVPSKKFKVLGNTDRHSIKKNLIGALLFDSGETAEATRLKRTARRRYTRRKNRICYLQEIFSNEMAKVDDSFFHRLEESFLVEEDKKHERHPIFGNIVDEVAYHEKYPTIYHLRKKLVDSTDKADLRLIYLALAHMIKFRGHFLIEGDLNPDNSDVDKLFIQLVQTYNQLFEENPINASGVDAKAILSARLSKSRRLENLIAQLPGEKKNGLFGNLIALSLGLTPNFKSNFDLAEDAKLQLSKDTYDDDLDNLLAQIGDQYADLFLAAKNLSDAILLSDILRVNTEITKAPLSASMIKRYDEHHQDLTLLKALVRQQLPEKYKEIFFDQSKNGYAGYIDGGASQEEFYKFIKPILEKMDGTEELLVKLNREDLLRKQRTFDNGSIPHQIHLGELHAILRRQEDFYPFLKDNREKIEKILTFRIPYYVGPLARGNSRFAWMTRKSEETITPWNFEEVVDKGASAQSFIERMTNFDKNLPNEKVLPKHSLLYEYFTVYNELTKVKYVTEGMRKPAFLSGEQKKAIVDLLFKTNRKVTVKQLKEDYFKKIECFDSVEISGVEDRFNASLGTYHDLLKIIKDKDFLDNEENEDILEDIVLTLTLFEDREMIEERLKTYAHLFDDKVMKQLKRRRYTGWGRLSRKLINGIRDKQSGKTILDFLKSDGFANRNFMQLIHDDSLTFKEDIQKAQVSGQGDSLHEHIANLAGSPAIKKGILQTVKVVDELVKVMGRHKPENIVIEMARENQTTQKGQKNSRERMKRIEEGIKELGSQILKEHPVENTQLQNEKLYLYYLQNGRDMYVDQELDINRLSDYDVDHIVPQSFLKDDSIDNKVLTRSDKARGKSDNVPSEEVVKKMKNYWRQLLNAKLITQRKFDNLTKAERGGLSELDKAGFIKRQLVETRQITKHVAQILDSRMNTKYDENDKLIREVKVITLKSKLVSDFRKDFQFYKVREINNYHHAHDAYLNAVVGTALIKKYPKLESEFVYGDYKVYDVRKMIAKSEQEIGKATAKYFFYSNIMNFFKTEITLANGEIRKRPLIETNGETGEIVWDKGRDFATVRKVLSMPQVNIVKKTEVQTGGFSKESILPKRNSDKLIARKKDWDPKKYGGFDSPTVAYSVLVVAKVEKGKSKKLKSVKELLGITIMERSSFEKNPIDFLEAKGYKEVKKDLIIKLPKYSLFELENGRKRMLASAGELQKGNELALPSKYVNFLYLASHYEKLKGSPEDNEQKQLFVEQHKHYLDEIIEQISEFSKRVILADANLDKVLSAYNKHRDKPIREQAENIIHLFTLTNLGAPAAFKYFDTTIDRKRYTSTKEVLDATLIHQSITGLYETRIDLSQLGGDGGEAAAKEAAAKGGTLNIEDEHRLHETSKEPDVSLGSTWLSDFPQAWAETGGMGLAVRQAPLIIPLKATSTPVSIKQYPMSQEARLGIKPHIQRLLDQGILVPCQSPWNTPLLPVKKPGTNDYRPVQDLREVNKRVEDIHPTVPNPYNLLSGLPPSHQWYTVLDLKDAFFCLRLHPTSQPLFAFEWRDPEMGISGQLTWTRLPQGFKNSPTLFNEALHRDLADFRIQHPDLILLQYVDDLLLAATSELDCQQGTRALLQTLGNLGYRASAKKAQICQKQVKYLGYLLKEGQRWLTEARKETVMGQPTPKTPRQLREFLGKAGFCRLFIPGFAEMAAPLYPLTKPGTLFNWGPDQQKAYQEIKQALLTAPALGLPDLTKPFELFVDEKQGYAKGVLTQKLGPWRRPVAYLSKKLDPVAAGWPPCLRMVAAIAVLTKDAGKLTMGQPLVILAPHAVEALVKQPPDRWLSNARMTHYQALLLDTDRVQFGPVVALNPATLLPLPEEGLQHNCLDILAEAHGTRPDLTDQPLPDADHTWYTDGSSLLQEGQRKAGAAVTTETEVIWAKALPAGTSAQRAELIALTQALKMAEGKKLNVYTDSRYAFATAHIHGEIYRRRGWLTSEGKEIKNKDEILALLKALFLPKRLSIIHCPGHQKGHSAEARGNRMADQAARKAAITETPDTSTLLAGKRTADGSEFEKRTADGSEFESPKKKAKVE

SEQ ID NO: 2846 - protein, 2094 aa, synthetic construct
  source 1..2094: note = Description of Artificial Sequence: Synthetic polypeptide
MPAAKRVKLDGGDKKYSIGLDIGTNSVGWAVITDEYKVPSKKFKVLGNTDRHSIKKNLIGALLFDSGETAEATRLKRTARRRYTRRKNRICYLQEIFSNEMAKVDDSFFHRLEESFLVEEDKKHERHPIFGNIVDEVAYHEKYPTIYHLRKKLVDSTDKADLRLIYLALAHMIKFRGHFLIEGDLNPDNSDVDKLFIQLVQTYNQLFEENPINASGVDAKAILSARLSKSRRLENLIAQLPGEKKNGLFGNLIALSLGLTPNFKSNFDLAEDAKLQLSKDTYDDDLDNLLAQIGDQYADLFLAAKNLSDAILLSDILRVNTEITKAPLSASMIKRYDEHHQDLTLLKALVRQQLPEKYKEIFFDQSKNGYAGYIDGGASQEEFYKFIKPILEKMDGTEELLVKLNREDLLRKQRTFDNGSIPHQIHLGELHAILRRQEDFYPFLKDNREKIEKILTFRIPYYVGPLARGNSRFAWMTRKSEETITPWNFEEVVDKGASAQSFIERMTNFDKNLPNEKVLPKHSLLYEYFTVYNELTKVKYVTEGMRKPAFLSGEQKKAIVDLLFKTNRKVTVKQLKEDYFKKIECFDSVEISGVEDRFNASLGTYHDLLKIIKDKDFLDNEENEDILEDIVLTLTLFEDREMIEERLKTYAHLFDDKVMKQLKRRRYTGWGRLSRKLINGIRDKQSGKTILDFLKSDGFANRNFMQLIHDDSLTFKEDIQKAQVSGQGDSLHEHIANLAGSPAIKKGILQTVKVVDELVKVMGRHKPENIVIEMARENQTTQKGQKNSRERMKRIEEGIKELGSQILKEHPVENTQLQNEKLYLYYLQNGRDMYVDQELDINRLSDYDVDHIVPQSFLKDDSIDNKVLTRSDKARGKSDNVPSEEVVKKMKNYWRQLLNAKLITQRKFDNLTKAERGGLSELDKAGFIKRQLVETRQITKHVAQILDSRMNTKYDENDKLIREVKVITLKSKLVSDFRKDFQFYKVREINNYHHAHDAYLNAVVGTALIKKYPKLESEFVYGDYKVYDVRKMIAKSEQEIGKATAKYFFYSNIMNFFKTEITLANGEIRKRPLIETNGETGEIVWDKGRDFATVRKVLSMPQVNIVKKTEVQTGGFSKESILPKRNSDKLIARKKDWDPKKYGGFDSPTVAYSVLVVAKVEKGKSKKLKSVKELLGITIMERSSFEKNPIDFLEAKGYKEVKKDLIIKLPKYSLFELENGRKRMLASAGELQKGNELALPSKYVNFLYLASHYEKLKGSPEDNEQKQLFVEQHKHYLDEIIEQISEFSKRVILADANLDKVLSAYNKHRDKPIREQAENIIHLFTLTNLGAPAAFKYFDTTIDRKRYTSTKEVLDATLIHQSITGLYETRIDLSQLGGDGGGGGGGSGSSGGTLNIEDEHRLHETSKEPDVSLGSTWLSDFPQAWAETGGMGLAVRQAPLIIPLKATSTPVSIKQYPMSQEARLGIKPHIQRLLDQGILVPCQSPWNTPLLPVKKPGTNDYRPVQDLREVNKRVEDIHPTVPNPYNLLSGLPPSHQWYTVLDLKDAFFCLRLHPTSQPLFAFEWRDPEMGISGQLTWTRLPQGFKNSPTLFNEALHRDLADFRIQHPDLILLQYVDDLLLAATSELDCQQGTRALLQTLGNLGYRASAKKAQICQKQVKYLGYLLKEGQRWLTEARKETVMGQPTPKTPRQLREFLGKAGFCRLFIPGFAEMAAPLYPLTKPGTLFNWGPDQQKAYQEIKQALLTAPALGLPDLTKPFELFVDEKQGYAKGVLTQKLGPWRRPVAYLSKKLDPVAAGWPPCLRMVAAIAVLTKDAGKLTMGQPLVILAPHAVEALVKQPPDRWLSNARMTHYQALLLDTDRVQFGPVVALNPATLLPLPEEGLQHNCLDILAEAHGTRPDLTDQPLPDADHTWYTDGSSLLQEGQRKAGAAVTTETEVIWAKALPAGTSAQRAELIALTQALKMAEGKKLNVYTDSRYAFATAHIHGEIYRRRGWLTSEGKEIKNKDEILALLKALFLPKRLSIIHCPGHQKGHSAEARGNRMADQAARKAAITETPDTSTLLAGKRTADGSEFEKRTADGSEFESPKKKAKVE

SEQ ID NO: 2847 - protein, 2094 aa, synthetic construct
  source 1..2094: note = Description of Artificial Sequence: Synthetic polypeptide
MPAAKRVKLDGGDKKYSIGLDIGTNSVGWAVITDEYKVPSKKFKVLGNTDRHSIKKNLIGALLFDSGETAEATRLKRTARRRYTRRKNRICYLQEIFSNEMAKVDDSFFHRLEESFLVEEDKKHERHPIFGNIVDEVAYHEKYPTIYHLRKKLVDSTDKADLRLIYLALAHMIKFRGHFLIEGDLNPDNSDVDKLFIQLVQTYNQLFEENPINASGVDAKAILSARLSKSRRLENLIAQLPGEKKNGLFGNLIALSLGLTPNFKSNFDLAEDAKLQLSKDTYDDDLDNLLAQIGDQYADLFLAAKNLSDAILLSDILRVNTEITKAPLSASMIKRYDEHHQDLTLLKALVRQQLPEKYKEIFFDQSKNGYAGYIDGGASQEEFYKFIKPILEKMDGTEELLVKLNREDLLRKQRTFDNGSIPHQIHLGELHAILRRQEDFYPFLKDNREKIEKILTFRIPYYVGPLARGNSRFAWMTRKSEETITPWNFEEVVDKGASAQSFIERMTNFDKNLPNEKVLPKHSLLYEYFTVYNELTKVKYVTEGMRKPAFLSGEQKKAIVDLLFKTNRKVTVKQLKEDYFKKIECFDSVEISGVEDRFNASLGTYHDLLKIIKDKDFLDNEENEDILEDIVLTLTLFEDREMIEERLKTYAHLFDDKVMKQLKRRRYTGWGRLSRKLINGIRDKQSGKTILDFLKSDGFANRNFMQLIHDDSLTFKEDIQKAQVSGQGDSLHEHIANLAGSPAIKKGILQTVKVVDELVKVMGRHKPENIVIEMARENQTTQKGQKNSRERMKRIEEGIKELGSQILKEHPVENTQLQNEKLYLYYLQNGRDMYVDQELDINRLSDYDVDHIVPQSFLKDDSIDNKVLTRSDKARGKSDNVPSEEVVKKMKNYWRQLLNAKLITQRKFDNLTKAERGGLSELDKAGFIKRQLVETRQITKHVAQILDSRMNTKYDENDKLIREVKVITLKSKLVSDFRKDFQFYKVREINNYHHAHDAYLNAVVGTALIKKYPKLESEFVYGDYKVYDVRKMIAKSEQEIGKATAKYFFYSNIMNFFKTEITLANGEIRKRPLIETNGETGEIVWDKGRDFATVRKVLSMPQVNIVKKTEVQTGGFSKESILPKRNSDKLIARKKDWDPKKYGGFDSPTVAYSVLVVAKVEKGKSKKLKSVKELLGITIMERSSFEKNPIDFLEAKGYKEVKKDLIIKLPKYSLFELENGRKRMLASAGELQKGNELALPSKYVNFLYLASHYEKLKGSPEDNEQKQLFVEQHKHYLDEIIEQISEFSKRVILADANLDKVLSAYNKHRDKPIREQAENIIHLFTLTNLGAPAAFKYFDTTIDRKRYTSTKEVLDATLIHQSITGLYETRIDLSQLGGDGGPAPGSSGGGGGTLNIEDEHRLHETSKEPDVSLGSTWLSDFPQAWAETGGMGLAVRQAPLIIPLKATSTPVSIKQYPMSQEARLGIKPHIQRLLDQGILVPCQSPWNTPLLPVKKPGTNDYRPVQDLREVNKRVEDIHPTVPNPYNLLSGLPPSHQWYTVLDLKDAFFCLRLHPTSQPLFAFEWRDPEMGISGQLTWTRLPQGFKNSPTLFNEALHRDLADFRIQHPDLILLQYVDDLLLAATSELDCQQGTRALLQTLGNLGYRASAKKAQICQKQVKYLGYLLKEGQRWLTEARKETVMGQPTPKTPRQLREFLGKAGFCRLFIPGFAEMAAPLYPLTKPGTLFNWGPDQQKAYQEIKQALLTAPALGLPDLTKPFELFVDEKQGYAKGVLTQKLGPWRRPVAYLSKKLDPVAAGWPPCLRMVAAIAVLTKDAGKLTMGQPLVILAPHAVEALVKQPPDRWLSNARMTHYQALLLDTDRVQFGPVVALNPATLLPLPEEGLQHNCLDILAEAHGTRPDLTDQPLPDADHTWYTDGSSLLQEGQRKAGAAVTTETEVIWAKALPAGTSAQRAELIALTQALKMAEGKKLNVYTDSRYAFATAHIHGEIYRRRGWLTSEGKEIKNKDEILALLKALFLPKRLSIIHCPGHQKGHSAEARGNRMADQAARKAAITETPDTSTLLAGKRTADGSEFEKRTADGSEFESPKKKAKVE

SEQ ID NO: 2848 - protein, 2094 aa, synthetic construct
  source 1..2094: note = Description of Artificial Sequence: Synthetic polypeptide
MPAAKRVKLDGGDKKYSIGLDIGTNSVGWAVITDEYKVPSKKFKVLGNTDRHSIKKNLIGALLFDSGETAEATRLKRTARRRYTRRKNRICYLQEIFSNEMAKVDDSFFHRLEESFLVEEDKKHERHPIFGNIVDEVAYHEKYPTIYHLRKKLVDSTDKADLRLIYLALAHMIKFRGHFLIEGDLNPDNSDVDKLFIQLVQTYNQLFEENPINASGVDAKAILSARLSKSRRLENLIAQLPGEKKNGLFGNLIALSLGLTPNFKSNFDLAEDAKLQLSKDTYDDDLDNLLAQIGDQYADLFLAAKNLSDAILLSDILRVNTEITKAPLSASMIKRYDEHHQDLTLLKALVRQQLPEKYKEIFFDQSKNGYAGYIDGGASQEEFYKFIKPILEKMDGTEELLVKLNREDLLRKQRTFDNGSIPHQIHLGELHAILRRQEDFYPFLKDNREKIEKILTFRIPYYVGPLARGNSRFAWMTRKSEETITPWNFEEVVDKGASAQSFIERMTNFDKNLPNEKVLPKHSLLYEYFTVYNELTKVKYVTEGMRKPAFLSGEQKKAIVDLLFKTNRKVTVKQLKEDYFKKIECFDSVEISGVEDRFNASLGTYHDLLKIIKDKDFLDNEENEDILEDIVLTLTLFEDREMIEERLKTYAHLFDDKVMKQLKRRRYTGWGRLSRKLINGIRDKQSGKTILDFLKSDGFANRNFMQLIHDDSLTFKEDIQKAQVSGQGDSLHEHIANLAGSPAIKKGILQTVKVVDELVKVMGRHKPENIVIEMARENQTTQKGQKNSRERMKRIEEGIKELGSQILKEHPVENTQLQNEKLYLYYLQNGRDMYVDQELDINRLSDYDVDHIVPQSFLKDDSIDNKVLTRSDKARGKSDNVPSEEVVKKMKNYWRQLLNAKLITQRKFDNLTKAERGGLSELDKAGFIKRQLVETRQITKHVAQILDSRMNTKYDENDKLIREVKVITLKSKLVSDFRKDFQFYKVREINNYHHAHDAYLNAVVGTALIKKYPKLESEFVYGDYKVYDVRKMIAKSEQEIGKATAKYFFYSNIMNFFKTEITLANGEIRKRPLIETNGETGEIVWDKGRDFATVRKVLSMPQVNIVKKTEVQTGGFSKESILPKRNSDKLIARKKDWDPKKYGGFDSPTVAYSVLVVAKVEKGKSKKLKSVKELLGITIMERSSFEKNPIDFLEAKGYKEVKKDLIIKLPKYSLFELENGRKRMLASAGELQKGNELALPSKYVNFLYLASHYEKLKGSPEDNEQKQLFVEQHKHYLDEIIEQISEFSKRVILADANLDKVLSAYNKHRDKPIREQAENIIHLFTLTNLGAPAAFKYFDTTIDRKRYTSTKEVLDATLIHQSITGLYETRIDLSQLGGDGGGGGGSSPAPGGTLNIEDEHRLHETSKEPDVSLGSTWLSDFPQAWAETGGMGLAVRQAPLIIPLKATSTPVSIKQYPMSQEARLGIKPHIQRLLDQGILVPCQSPWNTPLLPVKKPGTNDYRPVQDLREVNKRVEDIHPTVPNPYNLLSGLPPSHQWYTVLDLKDAFFCLRLHPTSQPLFAFEWRDPEMGISGQLTWTRLPQGFKNSPTLFNEALHRDLADFRIQHPDLILLQYVDDLLLAATSELDCQQGTRALLQTLGNLGYRASAKKAQICQKQVKYLGYLLKEGQRWLTEARKETVMGQPTPKTPRQLREFLGKAGFCRLFIPGFAEMAAPLYPLTKPGTLFNWGPDQQKAYQEIKQALLTAPALGLPDLTKPFELFVDEKQGYAKGVLTQKLGPWRRPVAYLSKKLDPVAAGWPPCLRMVAAIAVLTKDAGKLTMGQPLVILAPHAVEALVKQPPDRWLSNARMTHYQALLLDTDRVQFGPVVALNPATLLPLPEEGLQHNCLDILAEAHGTRPDLTDQPLPDADHTWYTDGSSLLQEGQRKAGAAVTTETEVIWAKALPAGTSAQRAELIALTQALKMAEGKKLNVYTDSRYAFATAHIHGEIYRRRGWLTSEGKEIKNKDEILALLKALFLPKRLSIIHCPGHQKGHSAEARGNRMADQAARKAAITETPDTSTLLAGKRTADGSEFEKRTADGSEFESPKKKAKVE

SEQ ID NO: 2849 - protein, 2093 aa, synthetic construct
  source 1..2093: note = Description of Artificial Sequence: Synthetic polypeptide
MPAAKRVKLDGGDKKYSIGLDIGTNSVGWAVITDEYKVPSKKFKVLGNTDRHSIKKNLIGALLFDSGETAEATRLKRTARRRYTRRKNRICYLQEIFSNEMAKVDDSFFHRLEESFLVEEDKKHERHPIFGNIVDEVAYHEKYPTIYHLRKKLVDSTDKADLRLIYLALAHMIKFRGHFLIEGDLNPDNSDVDKLFIQLVQTYNQLFEENPINASGVDAKAILSARLSKSRRLENLIAQLPGEKKNGLFGNLIALSLGLTPNFKSNFDLAEDAKLQLSKDTYDDDLDNLLAQIGDQYADLFLAAKNLSDAILLSDILRVNTEITKAPLSASMIKRYDEHHQDLTLLKALVRQQLPEKYKEIFFDQSKNGYAGYIDGGASQEEFYKFIKPILEKMDGTEELLVKLNREDLLRKQRTFDNGSIPHQIHLGELHAILRRQEDFYPFLKDNREKIEKILTFRIPYYVGPLARGNSRFAWMTRKSEETITPWNFEEVVDKGASAQSFIERMTNFDKNLPNEKVLPKHSLLYEYFTVYNELTKVKYVTEGMRKPAFLSGEQKKAIVDLLFKTNRKVTVKQLKEDYFKKIECFDSVEISGVEDRFNASLGTYHDLLKIIKDKDFLDNEENEDILEDIVLTLTLFEDREMIEERLKTYAHLFDDKVMKQLKRRRYTGWGRLSRKLINGIRDKQSGKTILDFLKSDGFANRNFMQLIHDDSLTFKEDIQKAQVSGQGDSLHEHIANLAGSPAIKKGILQTVKVVDELVKVMGRHKPENIVIEMARENQTTQKGQKNSRERMKRIEEGIKELGSQILKEHPVENTQLQNEKLYLYYLQNGRDMYVDQELDINRLSDYDVDHIVPQSFLKDDSIDNKVLTRSDKARGKSDNVPSEEVVKKMKNYWRQLLNAKLITQRKFDNLTKAERGGLSELDKAGFIKRQLVETRQITKHVAQILDSRMNTKYDENDKLIREVKVITLKSKLVSDFRKDFQFYKVREINNYHHAHDAYLNAVVGTALIKKYPKLESEFVYGDYKVYDVRKMIAKSEQEIGKATAKYFFYSNIMNFFKTEITLANGEIRKRPLIETNGETGEIVWDKGRDFATVRKVLSMPQVNIVKKTEVQTGGFSKESILPKRNSDKLIARKKDWDPKKYGGFDSPTVAYSVLVVAKVEKGKSKKLKSVKELLGITIMERSSFEKNPIDFLEAKGYKEVKKDLIIKLPKYSLFELENGRKRMLASAGELQKGNELALPSKYVNFLYLASHYEKLKGSPEDNEQKQLFVEQHKHYLDEIIEQISEFSKRVILADANLDKVLSAYNKHRDKPIREQAENIIHLFTLTNLGAPAAFKYFDTTIDRKRYTSTKEVLDATLIHQSITGLYETRIDLSQLGGDGGGGSEAAAKGGTLNIEDEHRLHETSKEPDVSLGSTWLSDFPQAWAETGGMGLAVRQAPLIIPLKATSTPVSIKQYPMSQEARLGIKPHIQRLLDQGILVPCQSPWNTPLLPVKKPGTNDYRPVQDLREVNKRVEDIHPTVPNPYNLLSGLPPSHQWYTVLDLKDAFFCLRLHPTSQPLFAFEWRDPEMGISGQLTWTRLPQGFKNSPTLFNEALHRDLADFRIQHPDLILLQYVDDLLLAATSELDCQQGTRALLQTLGNLGYRASAKKAQICQKQVKYLGYLLKEGQRWLTEARKETVMGQPTPKTPRQLREFLGKAGFCRLFIPGFAEMAAPLYPLTKPGTLFNWGPDQQKAYQEIKQALLTAPALGLPDLTKPFELFVDEKQGYAKGVLTQKLGPWRRPVAYLSKKLDPVAAGWPPCLRMVAAIAVLTKDAGKLTMGQPLVILAPHAVEALVKQPPDRWLSNARMTHYQALLLDTDRVQFGPVVALNPATLLPLPEEGLQHNCLDILAEAHGTRPDLTDQPLPDADHTWYTDGSSLLQEGQRKAGAAVTTETEVIWAKALPAGTSAQRAELIALTQALKMAEGKKLNVYTDSRYAFATAHIHGEIYRRRGWLTSEGKEIKNKDEILALLKALFLPKRLSIIHCPGHQKGHSAEARGNRMADQAARKAAITETPDTSTLLAGKRTADGSEFEKRTADGSEFESPKKKAKVE

SEQ ID NO: 2850 - protein, 2093 aa, synthetic construct
  source 1..2093: note = Description of Artificial Sequence: Synthetic polypeptide
MPAAKRVKLDGGDKKYSIGLDIGTNSVGWAVITDEYKVPSKKFKVLGNTDRHSIKKNLIGALLFDSGETAEATRLKRTARRRYTRRKNRICYLQEIFSNEMAKVDDSFFHRLEESFLVEEDKKHERHPIFGNIVDEVAYHEKYPTIYHLRKKLVDSTDKADLRLIYLALAHMIKFRGHFLIEGDLNPDNSDVDKLFIQLVQTYNQLFEENPINASGVDAKAILSARLSKSRRLENLIAQLPGEKKNGLFGNLIALSLGLTPNFKSNFDLAEDAKLQLSKDTYDDDLDNLLAQIGDQYADLFLAAKNLSDAILLSDILRVNTEITKAPLSASMIKRYDEHHQDLTLLKALVRQQLPEKYKEIFFDQSKNGYAGYIDGGASQEEFYKFIKPILEKMDGTEELLVKLNREDLLRKQRTFDNGSIPHQIHLGELHAILRRQEDFYPFLKDNREKIEKILTFRIPYYVGPLARGNSRFAWMTRKSEETITPWNFEEVVDKGASAQSFIERMTNFDKNLPNEKVLPKHSLLYEYFTVYNELTKVKYVTEGMRKPAFLSGEQKKAIVDLLFKTNRKVTVKQLKEDYFKKIECFDSVEISGVEDRFNASLGTYHDLLKIIKDKDFLDNEENEDILEDIVLTLTLFEDREMIEERLKTYAHLFDDKVMKQLKRRRYTGWGRLSRKLINGIRDKQSGKTILDFLKSDGFANRNFMQLIHDDSLTFKEDIQKAQVSGQGDSLHEHIANLAGSPAIKKGILQTVKVVDELVKVMGRHKPENIVIEMARENQTTQKGQKNSRERMKRIEEGIKELGSQILKEHPVENTQLQNEKLYLYYLQNGRDMYVDQELDINRLSDYDVDHIVPQSFLKDDSIDNKVLTRSDKARGKSDNVPSEEVVKKMKNYWRQLLNAKLITQRKFDNLTKAERGGLSELDKAGFIKRQLVETRQITKHVAQILDSRMNTKYDENDKLIREVKVITLKSKLVSDFRKDFQFYKVREINNYHHAHDAYLNAVVGTALIKKYPKLESEFVYGDYKVYDVRKMIAKSEQEIGKATAKYFFYSNIMNFFKTEITLANGEIRKRPLIETNGETGEIVWDKGRDFATVRKVLSMPQVNIVKKTEVQTGGFSKESILPKRNSDKLIARKKDWDPKKYGGFDSPTVAYSVLVVAKVEKGKSKKLKSVKELLGITIMERSSFEKNPIDFLEAKGYKEVKKDLIIKLPKYSLFELENGRKRMLASAGELQKGNELALPSKYVNFLYLASHYEKLKGSPEDNEQKQLFVEQHKHYLDEIIEQISEFSKRVILADANLDKVLSAYNKHRDKPIREQAENIIHLFTLTNLGAPAAFKYFDTTIDRKRYTSTKEVLDATLIHQSITGLYETRIDLSQLGGDGGEAAAKPAPGGTLNIEDEHRLHETSKEPDVSLGSTWLSDFPQAWAETGGMGLAVRQAPLIIPLKATSTPVSIKQYPMSQEARLGIKPHIQRLLDQGILVPCQSPWNTPLLPVKKPGTNDYRPVQDLREVNKRVEDIHPTVPNPYNLLSGLPPSHQWYTVLDLKDAFFCLRLHPTSQPLFAFEWRDPEMGISGQLTWTRLPQGFKNSPTLFNEALHRDLADFRIQHPDLILLQYVDDLLLAATSELDCQQGTRALLQTLGNLGYRASAKKAQICQKQVKYLGYLLKEGQRWLTEARKETVMGQPTPKTPRQLREFLGKAGFCRLFIPGFAEMAAPLYPLTKPGTLFNWGPDQQKAYQEIKQALLTAPALGLPDLTKPFELFVDEKQGYAKGVLTQKLGPWRRPVAYLSKKLDPVAAGWPPCLRMVAAIAVLTKDAGKLTMGQPLVILAPHAVEALVKQPPDRWLSNARMTHYQALLLDTDRVQFGPVVALNPATLLPLPEEGLQHNCLDILAEAHGTRPDLTDQPLPDADHTWYTDGSSLLQEGQRKAGAAVTTETEVIWAKALPAGTSAQRAELIALTQALKMAEGKKLNVYTDSRYAFATAHIHGEIYRRRGWLTSEGKEIKNKDEILALLKALFLPKRLSIIHCPGHQKGHSAEARGNRMADQAARKAAITETPDTSTLLAGKRTADGSEFEKRTADGSEFESPKKKAKVE

SEQ ID NO: 2851 - protein, 2096 aa, synthetic construct
  source 1..2096: note = Description of Artificial Sequence: Synthetic polypeptide
MPAAKRVKLDGGDKKYSIGLDIGTNSVGWAVITDEYKVPSKKFKVLGNTDRHSIKKNLIGALLFDSGETAEATRLKRTARRRYTRRKNRICYLQEIFSNEMAKVDDSFFHRLEESFLVEEDKKHERHPIFGNIVDEVAYHEKYPTIYHLRKKLVDSTDKADLRLIYLALAHMIKFRGHFLIEGDLNPDNSDVDKLFIQLVQTYNQLFEENPINASGVDAKAILSARLSKSRRLENLIAQLPGEKKNGLFGNLIALSLGLTPNFKSNFDLAEDAKLQLSKDTYDDDLDNLLAQIGDQYADLFLAAKNLSDAILLSDILRVNTEITKAPLSASMIKRYDEHHQDLTLLKALVRQQLPEKYKEIFFDQSKNGYAGYIDGGASQEEFYKFIKPILEKMDGTEELLVKLNREDLLRKQRTFDNGSIPHQIHLGELHAILRRQEDFYPFLKDNREKIEKILTFRIPYYVGPLARGNSRFAWMTRKSEETITPWNFEEVVDKGASAQSFIERMTNFDKNLPNEKVLPKHSLLYEYFTVYNELTKVKYVTEGMRKPAFLSGEQKKAIVDLLFKTNRKVTVKQLKEDYFKKIECFDSVEISGVEDRFNASLGTYHDLLKIIKDKDFLDNEENEDILEDIVLTLTLFEDREMIEERLKTYAHLFDDKVMKQLKRRRYTGWGRLSRKLINGIRDKQSGKTILDFLKSDGFANRNFMQLIHDDSLTFKEDIQKAQVSGQGDSLHEHIANLAGSPAIKKGILQTVKVVDELVKVMGRHKPENIVIEMARENQTTQKGQKNSRERMKRIEEGIKELGSQILKEHPVENTQLQNEKLYLYYLQNGRDMYVDQELDINRLSDYDVDHIVPQSFLKDDSIDNKVLTRSDKARGKSDNVPSEEVVKKMKNYWRQLLNAKLITQRKFDNLTKAERGGLSELDKAGFIKRQLVETRQITKHVAQILDSRMNTKYDENDKLIREVKVITLKSKLVSDFRKDFQFYKVREINNYHHAHDAYLNAVVGTALIKKYPKLESEFVYGDYKVYDVRKMIAKSEQEIGKATAKYFFYSNIMNFFKTEITLANGEIRKRPLIETNGETGEIVWDKGRDFATVRKVLSMPQVNIVKKTEVQTGGFSKESILPKRNSDKLIARKKDWDPKKYGGFDSPTVAYSVLVVAKVEKGKSKKLKSVKELLGITIMERSSFEKNPIDFLEAKGYKEVKKDLIIKLPKYSLFELENGRKRMLASAGELQKGNELALPSKYVNFLYLASHYEKLKGSPEDNEQKQLFVEQHKHYLDEIIEQISEFSKRVILADANLDKVLSAYNKHRDKPIREQAENIIHLFTLTNLGAPAAFKYFDTTIDRKRYTSTKEVLDATLIHQSITGLYETRIDLSQLGGDGGPAPAPAPAPAPGGTLNIEDEHRLHETSKEPDVSLGSTWLSDFPQAWAETGGMGLAVRQAPLIIPLKATSTPVSIKQYPMSQEARLGIKPHIQRLLDQGILVPCQSPWNTPLLPVKKPGTNDYRPVQDLREVNKRVEDIHPTVPNPYNLLSGLPPSHQWYTVLDLKDAFFCLRLHPTSQPLFAFEWRDPEMGISGQLTWTRLPQGFKNSPTLFNEALHRDLADFRIQHPDLILLQYVDDLLLAATSELDCQQGTRALLQTLGNLGYRASAKKAQICQKQVKYLGYLLKEGQRWLTEARKETVMGQPTPKTPRQLREFLGKAGFCRLFIPGFAEMAAPLYPLTKPGTLFNWGPDQQKAYQEIKQALLTAPALGLPDLTKPFELFVDEKQGYAKGVLTQKLGPWRRPVAYLSKKLDPVAAGWPPCLRMVAAIAVLTKDAGKLTMGQPLVILAPHAVEALVKQPPDRWLSNARMTHYQALLLDTDRVQFGPVVALNPATLLPLPEEGLQHNCLDILAEAHGTRPDLTDQPLPDADHTWYTDGSSLLQEGQRKAGAAVTTETEVIWAKALPAGTSAQRAELIALTQALKMAEGKKLNVYTDSRYAFATAHIHGEIYRRRGWLTSEGKEIKNKDEILALLKALFLPKRLSIIHCPGHQKGHSAEARGNRMADQAARKAAITETPDTSTLLAGKRTADGSEFEKRTADGSEFESPKKKAKVE

SEQ ID NO: 2852 - protein, 2094 aa, synthetic construct
  source 1..2094: note = Description of Artificial Sequence: Synthetic polypeptide
MPAAKRVKLDGGDKKYSIGLDIGTNSVGWAVITDEYKVPSKKFKVLGNTDRHSIKKNLIGALLFDSGETAEATRLKRTARRRYTRRKNRICYLQEIFSNEMAKVDDSFFHRLEESFLVEEDKKHERHPIFGNIVDEVAYHEKYPTIYHLRKKLVDSTDKADLRLIYLALAHMIKFRGHFLIEGDLNPDNSDVDKLFIQLVQTYNQLFEENPINASGVDAKAILSARLSKSRRLENLIAQLPGEKKNGLFGNLIALSLGLTPNFKSNFDLAEDAKLQLSKDTYDDDLDNLLAQIGDQYADLFLAAKNLSDAILLSDILRVNTEITKAPLSASMIKRYDEHHQDLTLLKALVRQQLPEKYKEIFFDQSKNGYAGYIDGGASQEEFYKFIKPILEKMDGTEELLVKLNREDLLRKQRTFDNGSIPHQIHLGELHAILRRQEDFYPFLKDNREKIEKILTFRIPYYVGPLARGNSRFAWMTRKSEETITPWNFEEVVDKGASAQSFIERMTNFDKNLPNEKVLPKHSLLYEYFTVYNELTKVKYVTEGMRKPAFLSGEQKKAIVDLLFKTNRKVTVKQLKEDYFKKIECFDSVEISGVEDRFNASLGTYHDLLKIIKDKDFLDNEENEDILEDIVLTLTLFEDREMIEERLKTYAHLFDDKVMKQLKRRRYTGWGRLSRKLINGIRDKQSGKTILDFLKSDGFANRNFMQLIHDDSLTFKEDIQKAQVSGQGDSLHEHIANLAGSPAIKKGILQTVKVVDELVKVMGRHKPENIVIEMARENQTTQKGQKNSRERMKRIEEGIKELGSQILKEHPVENTQLQNEKLYLYYLQNGRDMYVDQELDINRLSDYDVDHIVPQSFLKDDSIDNKVLTRSDKARGKSDNVPSEEVVKKMKNYWRQLLNAKLITQRKFDNLTKAERGGLSELDKAGFIKRQLVETRQITKHVAQILDSRMNTKYDENDKLIREVKVITLKSKLVSDFRKDFQFYKVREINNYHHAHDAYLNAVVGTALIKKYPKLESEFVYGDYKVYDVRKMIAKSEQEIGKATAKYFFYSNIMNFFKTEITLANGEIRKRPLIETNGETGEIVWDKGRDFATVRKVLSMPQVNIVKKTEVQTGGFSKESILPKRNSDKLIARKKDWDPKKYGGFDSPTVAYSVLVVAKVEKGKSKKLKSVKELLGITIMERSSFEKNPIDFLEAKGYKEVKKDLIIKLPKYSLFELENGRKRMLASAGELQKGNELALPSKYVNFLYLASHYEKLKGSPEDNEQKQLFVEQHKHYLDEIIEQISEFSKRVILADANLDKVLSAYNKHRDKPIREQAENIIHLFTLTNLGAPAAFKYFDTTIDRKRYTSTKEVLDATLIHQSITGLYETRIDLSQLGGDGGGGSPAPGSSGGTLNIEDEHRLHETSKEPDVSLGSTWLSDFPQAWAETGGMGLAVRQAPLIIPLKATSTPVSIKQYPMSQEARLGIKPHIQRLLDQGILVPCQSPWNTPLLPVKKPGTNDYRPVQDLREVNKRVEDIHPTVPNPYNLLSGLPPSHQWYTVLDLKDAFFCLRLHPTSQPLFAFEWRDPEMGISGQLTWTRLPQGFKNSPTLFNEALHRDLADFRIQHPDLILLQYVDDLLLAATSELDCQQGTRALLQTLGNLGYRASAKKAQICQKQVKYLGYLLKEGQRWLTEARKETVMGQPTPKTPRQLREFLGKAGFCRLFIPGFAEMAAPLYPLTKPGTLFNWGPDQQKAYQEIKQALLTAPALGLPDLTKPFELFVDEKQGYAKGVLTQKLGPWRRPVAYLSKKLDPVAAGWPPCLRMVAAIAVLTKDAGKLTMGQPLVILAPHAVEALVKQPPDRWLSNARMTHYQALLLDTDRVQFGPVVALNPATLLPLPEEGLQHNCLDILAEAHGTRPDLTDQPLPDADHTWYTDGSSLLQEGQRKAGAAVTTETEVIWAKALPAGTSAQRAELIALTQALKMAEGKKLNVYTDSRYAFATAHIHGEIYRRRGWLTSEGKEIKNKDEILALLKALFLPKRLSIIHCPGHQKGHSAEARGNRMADQAARKAAITETPDTSTLLAGKRTADGSEFEKRTADGSEFESPKKKAKVE

SEQ ID NO: 2853 - protein, 2091 aa, synthetic construct
  source 1..2091: note = Description of Artificial Sequence: Synthetic polypeptide
MPAAKRVKLDGGDKKYSIGLDIGTNSVGWAVITDEYKVPSKKFKVLGNTDRHSIKKNLIGALLFDSGETAEATRLKRTARRRYTRRKNRICYLQEIFSNEMAKVDDSFFHRLEESFLVEEDKKHERHPIFGNIVDEVAYHEKYPTIYHLRKKLVDSTDKADLRLIYLALAHMIKFRGHFLIEGDLNPDNSDVDKLFIQLVQTYNQLFEENPINASGVDAKAILSARLSKSRRLENLIAQLPGEKKNGLFGNLIALSLGLTPNFKSNFDLAEDAKLQLSKDTYDDDLDNLLAQIGDQYADLFLAAKNLSDAILLSDILRVNTEITKAPLSASMIKRYDEHHQDLTLLKALVRQQLPEKYKEIFFDQSKNGYAGYIDGGASQEEFYKFIKPILEKMDGTEELLVKLNREDLLRKQRTFDNGSIPHQIHLGELHAILRRQEDFYPFLKDNREKIEKILTFRIPYYVGPLARGNSRFAWMTRKSEETITPWNFEEVVDKGASAQSFIERMTNFDKNLPNEKVLPKHSLLYEYFTVYNELTKVKYVTEGMRKPAFLSGEQKKAIVDLLFKTNRKVTVKQLKEDYFKKIECFDSVEISGVEDRFNASLGTYHDLLKIIKDKDFLDNEENEDILEDIVLTLTLFEDREMIEERLKTYAHLFDDKVMKQLKRRRYTGWGRLSRKLINGIRDKQSGKTILDFLKSDGFANRNFMQLIHDDSLTFKEDIQKAQVSGQGDSLHEHIANLAGSPAIKKGILQTVKVVDELVKVMGRHKPENIVIEMARENQTTQKGQKNSRERMKRIEEGIKELGSQILKEHPVENTQLQNEKLYLYYLQNGRDMYVDQELDINRLSDYDVDHIVPQSFLKDDSIDNKVLTRSDKARGKSDNVPSEEVVKKMKNYWRQLLNAKLITQRKFDNLTKAERGGLSELDKAGFIKRQLVETRQITKHVAQILDSRMNTKYDENDKLIREVKVITLKSKLVSDFRKDFQFYKVREINNYHHAHDAYLNAVVGTALIKKYPKLESEFVYGDYKVYDVRKMIAKSEQEIGKATAKYFFYSNIMNFFKTEITLANGEIRKRPLIETNGETGEIVWDKGRDFATVRKVLSMPQVNIVKKTEVQTGGFSKESILPKRNSDKLIARKKDWDPKKYGGFDSPTVAYSVLVVAKVEKGKSKKLKSVKELLGITIMERSSFEKNPIDFLEAKGYKEVKKDLIIKLPKYSLFELENGRKRMLASAGELQKGNELALPSKYVNFLYLASHYEKLKGSPEDNEQKQLFVEQHKHYLDEIIEQISEFSKRVILADANLDKVLSAYNKHRDKPIREQAENIIHLFTLTNLGAPAAFKYFDTTIDRKRYTSTKEVLDATLIHQSITGLYETRIDLSQLGGDGGGGSGGSGGTLNIEDEHRLHETSKEPDVSLGSTWLSDFPQAWAETGGMGLAVRQAPLIIPLKATSTPVSIKQYPMSQEARLGIKPHIQRLLDQGILVPCQSPWNTPLLPVKKPGTNDYRPVQDLREVNKRVEDIHPTVPNPYNLLSGLPPSHQWYTVLDLKDAFFCLRLHPTSQPLFAFEWRDPEMGISGQLTWTRLPQGFKNSPTLFNEALHRDLADFRIQHPDLILLQYVDDLLLAATSELDCQQGTRALLQTLGNLGYRASAKKAQICQKQVKYLGYLLKEGQRWLTEARKETVMGQPTPKTPRQLREFLGKAGFCRLFIPGFAEMAAPLYPLTKPGTLFNWGPDQQKAYQEIKQALLTAPALGLPDLTKPFELFVDEKQGYAKGVLTQKLGPWRRPVAYLSKKLDPVAAGWPPCLRMVAAIAVLTKDAGKLTMGQPLVILAPHAVEALVKQPPDRWLSNARMTHYQALLLDTDRVQFGPVVALNPATLLPLPEEGLQHNCLDILAEAHGTRPDLTDQPLPDADHTWYTDGSSLLQEGQRKAGAAVTTETEVIWAKALPAGTSAQRAELIALTQALKMAEGKKLNVYTDSRYAFATAHIHGEIYRRRGWLTSEGKEIKNKDEILALLKALFLPKRLSIIHCPGHQKGHSAEARGNRMADQAARKAAITETPDTSTLLAGKRTADGSEFEKRTADGSEFESPKKKAKVE

SEQ ID NO: 2854 - protein, 2094 aa, synthetic construct
  source 1..2094: note = Description of Artificial Sequence: Synthetic polypeptide
MPAAKRVKLDGGDKKYSIGLDIGTNSVGWAVITDEYKVPSKKFKVLGNTDRHSIKKNLIGALLFDSGETAEATRLKRTARRRYTRRKNRICYLQEIFSNEMAKVDDSFFHRLEESFLVEEDKKHERHPIFGNIVDEVAYHEKYPTIYHLRKKLVDSTDKADLRLIYLALAHMIKFRGHFLIEGDLNPDNSDVDKLFIQLVQTYNQLFEENPINASGVDAKAILSARLSKSRRLENLIAQLPGEKKNGLFGNLIALSLGLTPNFKSNFDLAEDAKLQLSKDTYDDDLDNLLAQIGDQYADLFLAAKNLSDAILLSDILRVNTEITKAPLSASMIKRYDEHHQDLTLLKALVRQQLPEKYKEIFFDQSKNGYAGYIDGGASQEEFYKFIKPILEKMDGTEELLVKLNREDLLRKQRTFDNGSIPHQIHLGELHAILRRQEDFYPFLKDNREKIEKILTFRIPYYVGPLARGNSRFAWMTRKSEETITPWNFEEVVDKGASAQSFIERMTNFDKNLPNEKVLPKHSLLYEYFTVYNELTKVKYVTEGMRKPAFLSGEQKKAIVDLLFKTNRKVTVKQLKEDYFKKIECFDSVEISGVEDRFNASLGTYHDLLKIIKDKDFLDNEENEDILEDIVLTLTLFEDREMIEERLKTYAHLFDDKVMKQLKRRRYTGWGRLSRKLINGIRDKQSGKTILDFLKSDGFANRNFMQLIHDDSLTFKEDIQKAQVSGQGDSLHEHIANLAGSPAIKKGILQTVKVVDELVKVMGRHKPENIVIEMARENQTTQKGQKNSRERMKRIEEGIKELGSQILKEHPVENTQLQNEKLYLYYLQNGRDMYVDQELDINRLSDYDVDHIVPQSFLKDDSIDNKVLTRSDKARGKSDNVPSEEVVKKMKNYWRQLLNAKLITQRKFDNLTKAERGGLSELDKAGFIKRQLVETRQITKHVAQILDSRMNTKYDENDKLIREVKVITLKSKLVSDFRKDFQFYKVREINNYHHAHDAYLNAVVGTALIKKYPKLESEFVYGDYKVYDVRKMIAKSEQEIGKATAKYFFYSNIMNFFKTEITLANGEIRKRPLIETNGETGEIVWDKGRDFATVRKVLSMPQVNIVKKTEVQTGGFSKESILPKRNSDKLIARKKDWDPKKYGGFDSPTVAYSVLVVAKVEKGKSKKLKSVKELLGITIMERSSFEKNPIDFLEAKGYKEVKKDLIIKLPKYSLFELENGRKRMLASAGELQKGNELALPSKYVNFLYLASHYEKLKGSPEDNEQKQLFVEQHKHYLDEIIEQISEFSKRVILADANLDKVLSAYNKHRDKPIREQAENIIHLFTLTNLGAPAAFKYFDTTIDRKRYTSTKEVLDATLIHQSITGLYETRIDLSQLGGDGGGGGGSSGGSGGTLNIEDEHRLHETSKEPDVSLGSTWLSDFPQAWAETGGMGLAVRQAPLIIPLKATSTPVSIKQYPMSQEARLGIKPHIQRLLDQGILVPCQSPWNTPLLPVKKPGTNDYRPVQDLREVNKRVEDIHPTVPNPYNLLSGLPPSHQWYTVLDLKDAFFCLRLHPTSQPLFAFEWRDPEMGISGQLTWTRLPQGFKNSPTLFNEALHRDLADFRIQHPDLILLQYVDDLLLAATSELDCQQGTRALLQTLGNLGYRASAKKAQICQKQVKYLGYLLKEGQRWLTEARKETVMGQPTPKTPRQLREFLGKAGFCRLFIPGFAEMAAPLYPLTKPGTLFNWGPDQQKAYQEIKQALLTAPALGLPDLTKPFELFVDEKQGYAKGVLTQKLGPWRRPVAYLSKKLDPVAAGWPPCLRMVAAIAVLTKDAGKLTMGQPLVILAPHAVEALVKQPPDRWLSNARMTHYQALLLDTDRVQFGPVVALNPATLLPLPEEGLQHNCLDILAEAHGTRPDLTDQPLPDADHTWYTDGSSLLQEGQRKAGAAVTTETEVIWAKALPAGTSAQRAELIALTQALKMAEGKKLNVYTDSRYAFATAHIHGEIYRRRGWLTSEGKEIKNKDEILALLKALFLPKRLSIIHCPGHQKGHSAEARGNRMADQAARKAAITETPDTSTLLAGKRTADGSEFEKRTADGSEFESPKKKAKVE

SEQ ID NO: 2855 - protein, 2091 aa, synthetic construct
  source 1..2091: note = Description of Artificial Sequence: Synthetic polypeptide
MPAAKRVKLDGGDKKYSIGLDIGTNSVGWAVITDEYKVPSKKFKVLGNTDRHSIKKNLIGALLFDSGETAEATRLKRTARRRYTRRKNRICYLQEIFSNEMAKVDDSFFHRLEESFLVEEDKKHERHPIFGNIVDEVAYHEKYPTIYHLRKKLVDSTDKADLRLIYLALAHMIKFRGHFLIEGDLNPDNSDVDKLFIQLVQTYNQLFEENPINASGVDAKAILSARLSKSRRLENLIAQLPGEKKNGLFGNLIALSLGLTPNFKSNFDLAEDAKLQLSKDTYDDDLDNLLAQIGDQYADLFLAAKNLSDAILLSDILRVNTEITKAPLSASMIKRYDEHHQDLTLLKALVRQQLPEKYKEIFFDQSKNGYAGYIDGGASQEEFYKFIKPILEKMDGTEELLVKLNREDLLRKQRTFDNGSIPHQIHLGELHAILRRQEDFYPFLKDNREKIEKILTFRIPYYVGPLARGNSRFAWMTRKSEETITPWNFEEVVDKGASAQSFIERMTNFDKNLPNEKVLPKHSLLYEYFTVYNELTKVKYVTEGMRKPAFLSGEQKKAIVDLLFKTNRKVTVKQLKEDYFKKIECFDSVEISGVEDRFNASLGTYHDLLKIIKDKDFLDNEENEDILEDIVLTLTLFEDREMIEERLKTYAHLFDDKVMKQLKRRRYTGWGRLSRKLINGIRDKQSGKTILDFLKSDGFANRNFMQLIHDDSLTFKEDIQKAQVSGQGDSLHEHIANLAGSPAIKKGILQTVKVVDELVKVMGRHKPENIVIEMARENQTTQKGQKNSRERMKRIEEGIKELGSQILKEHPVENTQLQNEKLYLYYLQNGRDMYVDQELDINRLSDYDVDHIVPQSFLKDDSIDNKVLTRSDKARGKSDNVPSEEVVKKMKNYWRQLLNAKLITQRKFDNLTKAERGGLSELDKAGFIKRQLVETRQITKHVAQILDSRMNTKYDENDKLIREVKVITLKSKLVSDFRKDFQFYKVREINNYHHAHDAYLNAVVGTALIKKYPKLESEFVYGDYKVYDVRKMIAKSEQEIGKATAKYFFYSNIMNFFKTEITLANGEIRKRPLIETNGETGEIVWDKGRDFATVRKVLSMPQVNIVKKTEVQTGGFSKESILPKRNSDKLIARKKDWDPKKYGGFDSPTVAYSVLVVAKVEKGKSKKLKSVKELLGITIMERSSFEKNPIDFLEAKGYKEVKKDLIIKLPKYSLFELENGRKRMLASAGELQKGNELALPSKYVNFLYLASHYEKLKGSPEDNEQKQLFVEQHKHYLDEIIEQISEFSKRVILADANLDKVLSAYNKHRDKPIREQAENIIHLFTLTNLGAPAAFKYFDTTIDRKRYTSTKEVLDATLIHQSITGLYETRIDLSQLGGDGGGSSGGSGGTLNIEDEHRLHETSKEPDVSLGSTWLSDFPQAWAETGGMGLAVRQAPLIIPLKATSTPVSIKQYPMSQEARLGIKPHIQRLLDQGILVPCQSPWNTPLLPVKKPGTNDYRPVQDLREVNKRVEDIHPTVPNPYNLLSGLPPSHQWYTVLDLKDAFFCLRLHPTSQPLFAFEWRDPEMGISGQLTWTRLPQGFKNSPTLFNEALHRDLADFRIQHPDLILLQYVDDLLLAATSELDCQQGTRALLQTLGNLGYRASAKKAQICQKQVKYLGYLLKEGQRWLTEARKETVMGQPTPKTPRQLREFLGKAGFCRLFIPGFAEMAAPLYPLTKPGTLFNWGPDQQKAYQEIKQALLTAPALGLPDLTKPFELFVDEKQGYAKGVLTQKLGPWRRPVAYLSKKLDPVAAGWPPCLRMVAAIAVLTKDAGKLTMGQPLVILAPHAVEALVKQPPDRWLSNARMTHYQALLLDTDRVQFGPVVALNPATLLPLPEEGLQHNCLDILAEAHGTRPDLTDQPLPDADHTWYTDGSSLLQEGQRKAGAAVTTETEVIWAKALPAGTSAQRAELIALTQALKMAEGKKLNVYTDSRYAFATAHIHGEIYRRRGWLTSEGKEIKNKDEILALLKALFLPKRLSIIHCPGHQKGHSAEARGNRMADQAARKAAITETPDTSTLLAGKRTADGSEFEKRTADGSEFESPKKKAKVE

SEQ ID NO: 2856 - protein, 2093 aa, synthetic construct
  source 1..2093: note = Description of Artificial Sequence: Synthetic polypeptide
MPAAKRVKLDGGDKKYSIGLDIGTNSVGWAVITDEYKVPSKKFKVLGNTDRHSIKKNLIGALLFDSGETAEATRLKRTARRRYTRRKNRICYLQEIFSNEMAKVDDSFFHRLEESFLVEEDKKHERHPIFGNIVDEVAYHEKYPTIYHLRKKLVDSTDKADLRLIYLALAHMIKFRGHFLIEGDLNPDNSDVDKLFIQLVQTYNQLFEENPINASGVDAKAILSARLSKSRRLENLIAQLPGEKKNGLFGNLIALSLGLTPNFKSNFDLAEDAKLQLSKDTYDDDLDNLLAQIGDQYADLFLAAKNLSDAILLSDILRVNTEITKAPLSASMIKRYDEHHQDLTLLKALVRQQLPEKYKEIFFDQSKNGYAGYIDGGASQEEFYKFIKPILEKMDGTEELLVKLNREDLLRKQRTFDNGSIPHQIHLGELHAILRRQEDFYPFLKDNREKIEKILTFRIPYYVGPLARGNSRFAWMTRKSEETITPWNFEEVVDKGASAQSFIERMTNFDKNLPNEKVLPKHSLLYEYFTVYNELTKVKYVTEGMRKPAFLSGEQKKAIVDLLFKTNRKVTVKQLKEDYFKKIECFDSVEISGVEDRFNASLGTYHDLLKIIKDKDFLDNEENEDILEDIVLTLTLFEDREMIEERLKTYAHLFDDKVMKQLKRRRYTGWGRLSRKLINGIRDKQSGKTILDFLKSDGFANRNFMQLIHDDSLTFKEDIQKAQVSGQGDSLHEHIANLAGSPAIKKGILQTVKVVDELVKVMGRHKPENIVIEMARENQTTQKGQKNSRERMKRIEEGIKELGSQILKEHPVENTQLQNEKLYLYYLQNGRDMYVDQELDINRLSDYDVDHIVPQSFLKDDSIDNKVLTRSDKARGKSDNVPSEEVVKKMKNYWRQLLNAKLITQRKFDNLTKAERGGLSELDKAGFIKRQLVETRQITKHVAQILDSRMNTKYDENDKLIREVKVITLKSKLVSDFRKDFQFYKVREINNYHHAHDAYLNAVVGTALIKKYPKLESEFVYGDYKVYDVRKMIAKSEQEIGKATAKYFFYSNIMNFFKTEITLANGEIRKRPLIETNGETGEIVWDKGRDFATVRKVLSMPQVNIVKKTEVQTGGFSKESILPKRNSDKLIARKKDWDPKKYGGFDSPTVAYSVLVVAKVEKGKSKKLKSVKELLGITIMERSSFEKNPIDFLEAKGYKEVKKDLIIKLPKYSLFELENGRKRMLASAGELQKGNELALPSKYVNFLYLASHYEKLKGSPEDNEQKQLFVEQHKHYLDEIIEQISEFSKRVILADANLDKVLSAYNKHRDKPIREQAENIIHLFTLTNLGAPAAFKYFDTTIDRKRYTSTKEVLDATLIHQSITGLYETRIDLSQLGGDGGGGGEAAAKGGTLNIEDEHRLHETSKEPDVSLGSTWLSDFPQAWAETGGMGLAVRQAPLIIPLKATSTPVSIKQYPMSQEARLGIKPHIQRLLDQGILVPCQSPWNTPLLPVKKPGTNDYRPVQDLREVNKRVEDIHPTVPNPYNLLSGLPPSHQWYTVLDLKDAFFCLRLHPTSQPLFAFEWRDPEMGISGQLTWTRLPQGFKNSPTLFNEALHRDLADFRIQHPDLILLQYVDDLLLAATSELDCQQGTRALLQTLGNLGYRASAKKAQICQKQVKYLGYLLKEGQRWLTEARKETVMGQPTPKTPRQLREFLGKAGFCRLFIPGFAEMAAPLYPLTKPGTLFNWGPDQQKAYQEIKQALLTAPALGLPDLTKPFELFVDEKQGYAKGVLTQKLGPWRRPVAYLSKKLDPVAAGWPPCLRMVAAIAVLTKDAGKLTMGQPLVILAPHAVEALVKQPPDRWLSNARMTHYQALLLDTDRVQFGPVVALNPATLLPLPEEGLQHNCLDILAEAHGTRPDLTDQPLPDADHTWYTDGSSLLQEGQRKAGAAVTTETEVIWAKALPAGTSAQRAELIALTQALKMAEGKKLNVYTDSRYAFATAHIHGEIYRRRGWLTSEGKEIKNKDEILALLKALFLPKRLSIIHCPGHQKGHSAEARGNRMADQAARKAAITETPDTSTLLAGKRTADGSEFEKRTADGSEFESPKKKAKVE

SEQ ID NO: 2857 - protein, 2096 aa, synthetic construct
  source 1..2096: note = Description of Artificial Sequence: Synthetic polypeptide
MPAAKRVKLDGGDKKYSIGLDIGTNSVGWAVITDEYKVPSKKFKVLGNTDRHSIKKNLIGALLFDSGETAEATRLKRTARRRYTRRKNRICYLQEIFSNEMAKVDDSFFHRLEESFLVEEDKKHERHPIFGNIVDEVAYHEKYPTIYHLRKKLVDSTDKADLRLIYLALAHMIKFRGHFLIEGDLNPDNSDVDKLFIQLVQTYNQLFEENPINASGVDAKAILSARLSKSRRLENLIAQLPGEKKNGLFGNLIALSLGLTPNFKSNFDLAEDAKLQLSKDTYDDDLDNLLAQIGDQYADLFLAAKNLSDAILLSDILRVNTEITKAPLSASMIKRYDEHHQDLTLLKALVRQQLPEKYKEIFFDQSKNGYAGYIDGGASQEEFYKFIKPILEKMDGTEELLVKLNREDLLRKQRTFDNGSIPHQIHLGELHAILRRQEDFYPFLKDNREKIEKILTFRIPYYVGPLARGNSRFAWMTRKSEETITPWNFEEVVDKGASAQSFIERMTNFDKNLPNEKVLPKHSLLYEYFTVYNELTKVKYVTEGMRKPAFLSGEQKKAIVDLLFKTNRKVTVKQLKEDYFKKIECFDSVEISGVEDRFNASLGTYHDLLKIIKDKDFLDNEENEDILEDIVLTLTLFEDREMIEERLKTYAHLFDDKVMKQLKRRRYTGWGRLSRKLINGIRDKQSGKTILDFLKSDGFANRNFMQLIHDDSLTFKEDIQKAQVSGQGDSLHEHIANLAGSPAIKKGILQTVKVVDELVKVMGRHKPENIVIEMARENQTTQKGQKNSRERMKRIEEGIKELGSQILKEHPVENTQLQNEKLYLYYLQNGRDMYVDQELDINRLSDYDVDHIVPQSFLKDDSIDNKVLTRSDKARGKSDNVPSEEVVKKMKNYWRQLLNAKLITQRKFDNLTKAERGGLSELDKAGFIKRQLVETRQITKHVAQILDSRMNTKYDENDKLIREVKVITLKSKLVSDFRKDFQFYKVREINNYHHAHDAYLNAVVGTALIKKYPKLESEFVYGDYKVYDVRKMIAKSEQEIGKATAKYFFYSNIMNFFKTEITLANGEIRKRPLIETNGETGEIVWDKGRDFATVRKVLSMPQVNIVKKTEVQTGGFSKESILPKRNSDKLIARKKDWDPKKYGGFDSPTVAYSVLVVAKVEKGKSKKLKSVKELLGITIMERSSFEKNPIDFLEAKGYKEVKKDLIIKLPKYSLFELENGRKRMLASAGELQKGNELALPSKYVNFLYLASHYEKLKGSPEDNEQKQLFVEQHKHYLDEIIEQISEFSKRVILADANLDKVLSAYNKHRDKPIREQAENIIHLFTLTNLGAPAAFKYFDTTIDRKRYTSTKEVLDATLIHQSITGLYETRIDLSQLGGDGGGGSEAAAKPAPGGTLNIEDEHRLHETSKEPDVSLGSTWLSDFPQAWAETGGMGLAVRQAPLIIPLKATSTPVSIKQYPMSQEARLGIKPHIQRLLDQGILVPCQSPWNTPLLPVKKPGTNDYRPVQDLREVNKRVEDIHPTVPNPYNLLSGLPPSHQWYTVLDLKDAFFCLRLHPTSQPLFAFEWRDPEMGISGQLTWTRLPQGFKNSPTLFNEALHRDLADFRIQHPDLILLQYVDDLLLAATSELDCQQGTRALLQTLGNLGYRASAKKAQICQKQVKYLGYLLKEGQRWLTEARKETVMGQPTPKTPRQLREFLGKAGFCRLFIPGFAEMAAPLYPLTKPGTLFNWGPDQQKAYQEIKQALLTAPALGLPDLTKPFELFVDEKQGYAKGVLTQKLGPWRRPVAYLSKKLDPVAAGWPPCLRMVAAIAVLTKDAGKLTMGQPLVILAPHAVEALVKQPPDRWLSNARMTHYQALLLDTDRVQFGPVVALNPATLLPLPEEGLQHNCLDILAEAHGTRPDLTDQPLPDADHTWYTDGSSLLQEGQRKAGAAVTTETEVIWAKALPAGTSAQRAELIALTQALKMAEGKKLNVYTDSRYAFATAHIHGEIYRRRGWLTSEGKEIKNKDEILALLKALFLPKRLSIIHCPGHQKGHSAEARGNRMADQAARKAAITETPDTSTLLAGKRTADGSEFEKRTADGSEFESPKKKAKVE

SEQ ID NO: 2858 - protein, 2101 aa, synthetic construct
  source 1..2101: note = Description of Artificial Sequence: Synthetic polypeptide
MPAAKRVKLDGGDKKYSIGLDIGTNSVGWAVITDEYKVPSKKFKVLGNTDRHSIKKNLIGALLFDSGETAEATRLKRTARRRYTRRKNRICYLQEIFSNEMAKVDDSFFHRLEESFLVEEDKKHERHPIFGNIVDEVAYHEKYPTIYHLRKKLVDSTDKADLRLIYLALAHMIKFRGHFLIEGDLNPDNSDVDKLFIQLVQTYNQLFEENPINASGVDAKAILSARLSKSRRLENLIAQLPGEKKNGLFGNLIALSLGLTPNFKSNFDLAEDAKLQLSKDTYDDDLDNLLAQIGDQYADLFLAAKNLSDAILLSDILRVNTEITKAPLSASMIKRYDEHHQDLTLLKALVRQQLPEKYKEIFFDQSKNGYAGYIDGGASQEEFYKFIKPILEKMDGTEELLVKLNREDLLRKQRTFDNGSIPHQIHLGELHAILRRQEDFYPFLKDNREKIEKILTFRIPYYVGPLARGNSRFAWMTRKSEETITPWNFEEVVDKGASAQSFIERMTNFDKNLPNEKVLPKHSLLYEYFTVYNELTKVKYVTEGMRKPAFLSGEQKKAIVDLLFKTNRKVTVKQLKEDYFKKIECFDSVEISGVEDRFNASLGTYHDLLKIIKDKDFLDNEENEDILEDIVLTLTLFEDREMIEERLKTYAHLFDDKVMKQLKRRRYTGWGRLSRKLINGIRDKQSGKTILDFLKSDGFANRNFMQLIHDDSLTFKEDIQKAQVSGQGDSLHEHIANLAGSPAIKKGILQTVKVVDELVKVMGRHKPENIVIEMARENQTTQKGQKNSRERMKRIEEGIKELGSQILKEHPVENTQLQNEKLYLYYLQNGRDMYVDQELDINRLSDYDVDHIVPQSFLKDDSIDNKVLTRSDKARGKSDNVPSEEVVKKMKNYWRQLLNAKLITQRKFDNLTKAERGGLSELDKAGFIKRQLVETRQITKHVAQILDSRMNTKYDENDKLIREVKVITLKSKLVSDFRKDFQFYKVREINNYHHAHDAYLNAVVGTALIKKYPKLESEFVYGDYKVYDVRKMIAKSEQEIGKATAKYFFYSNIMNFFKTEITLANGEIRKRPLIETNGETGEIVWDKGRDFATVRKVLSMPQVNIVKKTEVQTGGFSKESILPKRNSDKLIARKKDWDPKKYGGFDSPTVAYSVLVVAKVEKGKSKKLKSVKELLGITIMERSSFEKNPIDFLEAKGYKEVKKDLIIKLPKYSLFELENGRKRMLASAGELQKGNELALPSKYVNFLYLASHYEKLKGSPEDNEQKQLFVEQHKHYLDEIIEQISEFSKRVILADANLDKVLSAYNKHRDKPIREQAENIIHLFTLTNLGAPAAFKYFDTTIDRKRYTSTKEVLDATLIHQSITGLYETRIDLSQLGGDGGSGSETPGTSESATPESGGTLNIEDEHRLHETSKEPDVSLGSTWLSDFPQAWAETGGMGLAVRQAPLIIPLKATSTPVSIKQYPMSQEARLGIKPHIQRLLDQGILVPCQSPWNTPLLPVKKPGTNDYRPVQDLREVNKRVEDIHPTVPNPYNLLSGLPPSHQWYTVLDLKDAFFCLRLHPTSQPLFAFEWRDPEMGISGQLTWTRLPQGFKNSPTLFNEALHRDLADFRIQHPDLILLQYVDDLLLAATSELDCQQGTRALLQTLGNLGYRASAKKAQICQKQVKYLGYLLKEGQRWLTEARKETVMGQPTPKTPRQLREFLGKAGFCRLFIPGFAEMAAPLYPLTKPGTLFNWGPDQQKAYQEIKQALLTAPALGLPDLTKPFELFVDEKQGYAKGVLTQKLGPWRRPVAYLSKKLDPVAAGWPPCLRMVAAIAVLTKDAGKLTMGQPLVILAPHAVEALVKQPPDRWLSNARMTHYQALLLDTDRVQFGPVVALNPATLLPLPEEGLQHNCLDILAEAHGTRPDLTDQPLPDADHTWYTDGSSLLQEGQRKAGAAVTTETEVIWAKALPAGTSAQRAELIALTQALKMAEGKKLNVYTDSRYAFATAHIHGEIYRRRGWLTSEGKEIKNKDEILALLKALFLPKRLSIIHCPGHQKGHSAEARGNRMADQAARKAAITETPDTSTLLAGKRTADGSEFEKRTADGSEFESPKKKAKVE

SEQ ID NO: 2859 - protein, 2094 aa, synthetic construct
  source 1..2094: note = Description of Artificial Sequence: Synthetic polypeptide
MPAAKRVKLDGGDKKYSIGLDIGTNSVGWAVITDEYKVPSKKFKVLGNTDRHSIKKNLIGALLFDSGETAEATRLKRTARRRYTRRKNRICYLQEIFSNEMAKVDDSFFHRLEESFLVEEDKKHERHPIFGNIVDEVAYHEKYPTIYHLRKKLVDSTDKADLRLIYLALAHMIKFRGHFLIEGDLNPDNSDVDKLFIQLVQTYNQLFEENPINASGVDAKAILSARLSKSRRLENLIAQLPGEKKNGLFGNLIALSLGLTPNFKSNFDLAEDAKLQLSKDTYDDDLDNLLAQIGDQYADLFLAAKNLSDAILLSDILRVNTEITKAPLSASMIKRYDEHHQDLTLLKALVRQQLPEKYKEIFFDQSKNGYAGYIDGGASQEEFYKFIKPILEKMDGTEELLVKLNREDLLRKQRTFDNGSIPHQIHLGELHAILRRQEDFYPFLKDNREKIEKILTFRIPYYVGPLARGNSRFAWMTRKSEETITPWNFEEVVDKGASAQSFIERMTNFDKNLPNEKVLPKHSLLYEYFTVYNELTKVKYVTEGMRKPAFLSGEQKKAIVDLLFKTNRKVTVKQLKEDYFKKIECFDSVEISGVEDRFNASLGTYHDLLKIIKDKDFLDNEENEDILEDIVLTLTLFEDREMIEERLKTYAHLFDDKVMKQLKRRRYTGWGRLSRKLINGIRDKQSGKTILDFLKSDGFANRNFMQLIHDDSLTFKEDIQKAQVSGQGDSLHEHIANLAGSPAIKKGILQTVKVVDELVKVMGRHKPENIVIEMARENQTTQKGQKNSRERMKRIEEGIKELGSQILKEHPVENTQLQNEKLYLYYLQNGRDMYVDQELDINRLSDYDVDHIVPQSFLKDDSIDNKVLTRSDKARGKSDNVPSEEVVKKMKNYWRQLLNAKLITQRKFDNLTKAERGGLSELDKAGFIKRQLVETRQITKHVAQILDSRMNTKYDENDKLIREVKVITLKSKLVSDFRKDFQFYKVREINNYHHAHDAYLNAVVGTALIKKYPKLESEFVYGDYKVYDVRKMIAKSEQEIGKATAKYFFYSNIMNFFKTEITLANGEIRKRPLIETNGETGEIVWDKGRDFATVRKVLSMPQVNIVKKTEVQTGGFSKESILPKRNSDKLIARKKDWDPKKYGGFDSPTVAYSVLVVAKVEKGKSKKLKSVKELLGITIMERSSFEKNPIDFLEAKGYKEVKKDLIIKLPKYSLFELENGRKRMLASAGELQKGNELALPSKYVNFLYLASHYEKLKGSPEDNEQKQLFVEQHKHYLDEIIEQISEFSKRVILADANLDKVLSAYNKHRDKPIREQAENIIHLFTLTNLGAPAAFKYFDTTIDRKRYTSTKEVLDATLIHQSITGLYETRIDLSQLGGDGGGSSGGSGGGGGTLNIEDEHRLHETSKEPDVSLGSTWLSDFPQAWAETGGMGLAVRQAPLIIPLKATSTPVSIKQYPMSQEARLGIKPHIQRLLDQGILVPCQSPWNTPLLPVKKPGTNDYRPVQDLREVNKRVEDIHPTVPNPYNLLSGLPPSHQWYTVLDLKDAFFCLRLHPTSQPLFAFEWRDPEMGISGQLTWTRLPQGFKNSPTLFNEALHRDLADFRIQHPDLILLQYVDDLLLAATSELDCQQGTRALLQTLGNLGYRASAKKAQICQKQVKYLGYLLKEGQRWLTEARKETVMGQPTPKTPRQLREFLGKAGFCRLFIPGFAEMAAPLYPLTKPGTLFNWGPDQQKAYQEIKQALLTAPALGLPDLTKPFELFVDEKQGYAKGVLTQKLGPWRRPVAYLSKKLDPVAAGWPPCLRMVAAIAVLTKDAGKLTMGQPLVILAPHAVEALVKQPPDRWLSNARMTHYQALLLDTDRVQFGPVVALNPATLLPLPEEGLQHNCLDILAEAHGTRPDLTDQPLPDADHTWYTDGSSLLQEGQRKAGAAVTTETEVIWAKALPAGTSAQRAELIALTQALKMAEGKKLNVYTDSRYAFATAHIHGEIYRRRGWLTSEGKEIKNKDEILALLKALFLPKRLSIIHCPGHQKGHSAEARGNRMADQAARKAAITETPDTSTLLAGKRTADGSEFEKRTADGSEFESPKKKAKVE

SEQ ID NO: 2860 - protein, 2096 aa, synthetic construct
  source 1..2096: note = Description of Artificial Sequence: Synthetic polypeptide
MPAAKRVKLDGGDKKYSIGLDIGTNSVGWAVITDEYKVPSKKFKVLGNTDRHSIKKNLIGALLFDSGETAEATRLKRTARRRYTRRKNRICYLQEIFSNEMAKVDDSFFHRLEESFLVEEDKKHERHPIFGNIVDEVAYHEKYPTIYHLRKKLVDSTDKADLRLIYLALAHMIKFRGHFLIEGDLNPDNSDVDKLFIQLVQTYNQLFEENPINASGVDAKAILSARLSKSRRLENLIAQLPGEKKNGLFGNLIALSLGLTPNFKSNFDLAEDAKLQLSKDTYDDDLDNLLAQIGDQYADLFLAAKNLSDAILLSDILRVNTEITKAPLSASMIKRYDEHHQDLTLLKALVRQQLPEKYKEIFFDQSKNGYAGYIDGGASQEEFYKFIKPILEKMDGTEELLVKLNREDLLRKQRTFDNGSIPHQIHLGELHAILRRQEDFYPFLKDNREKIEKILTFRIPYYVGPLARGNSRFAWMTRKSEETITPWNFEEVVDKGASAQSFIERMTNFDKNLPNEKVLPKHSLLYEYFTVYNELTKVKYVTEGMRKPAFLSGEQKKAIVDLLFKTNRKVTVKQLKEDYFKKIECFDSVEISGVEDRFNASLGTYHDLLKIIKDKDFLDNEENEDILEDIVLTLTLFEDREMIEERLKTYAHLFDDKVMKQLKRRRYTGWGRLSRKLINGIRDKQSGKTILDFLKSDGFANRNFMQLIHDDSLTFKEDIQKAQVSGQGDSLHEHIANLAGSPAIKKGILQTVKVVDELVKVMGRHKPENIVIEMARENQTTQKGQKNSRERMKRIEEGIKELGSQILKEHPVENTQLQNEKLYLYYLQNGRDMYVDQELDINRLSDYDVDHIVPQSFLKDDSIDNKVLTRSDKARGKSDNVPSEEVVKKMKNYWRQLLNAKLITQRKFDNLTKAERGGLSELDKAGFIKRQLVETRQITKHVAQILDSRMNTKYDENDKLIREVKVITLKSKLVSDFRKDFQFYKVREINNYHHAHDAYLNAVVGTALIKKYPKLESEFVYGDYKVYDVRKMIAKSEQEIGKATAKYFFYSNIMNFFKTEITLANGEIRKRPLIETNGETGEIVWDKGRDFATVRKVLSMPQVNIVKKTEVQTGGFSKESILPKRNSDKLIARKKDWDPKKYGGFDSPTVAYSVLVVAKVEKGKSKKLKSVKELLGITIMERSSFEKNPIDFLEAKGYKEVKKDLIIKLPKYSLFELENGRKRMLASAGELQKGNELALPSKYVNFLYLASHYEKLKGSPEDNEQKQLFVEQHKHYLDEIIEQISEFSKRVILADANLDKVLSAYNKHRDKPIREQAENIIHLFTLTNLGAPAAFKYFDTTIDRKRYTSTKEVLDATLIHQSITGLYETRIDLSQLGGDGGGSSGGSEAAAKGGTLNIEDEHRLHETSKEPDVSLGSTWLSDFPQAWAETGGMGLAVRQAPLIIPLKATSTPVSIKQYPMSQEARLGIKPHIQRLLDQGILVPCQSPWNTPLLPVKKPGTNDYRPVQDLREVNKRVEDIHPTVPNPYNLLSGLPPSHQWYTVLDLKDAFFCLRLHPTSQPLFAFEWRDPEMGISGQLTWTRLPQGFKNSPTLFNEALHRDLADFRIQHPDLILLQYVDDLLLAATSELDCQQGTRALLQTLGNLGYRASAKKAQICQKQVKYLGYLLKEGQRWLTEARKETVMGQPTPKTPRQLREFLGKAGFCRLFIPGFAEMAAPLYPLTKPGTLFNWGPDQQKAYQEIKQALLTAPALGLPDLTKPFELFVDEKQGYAKGVLTQKLGPWRRPVAYLSKKLDPVAAGWPPCLRMVAAIAVLTKDAGKLTMGQPLVILAPHAVEALVKQPPDRWLSNARMTHYQALLLDTDRVQFGPVVALNPATLLPLPEEGLQHNCLDILAEAHGTRPDLTDQPLPDADHTWYTDGSSLLQEGQRKAGAAVTTETEVIWAKALPAGTSAQRAELIALTQALKMAEGKKLNVYTDSRYAFATAHIHGEIYRRRGWLTSEGKEIKNKDEILALLKALFLPKRLSIIHCPGHQKGHSAEARGNRMADQAARKAAITETPDTSTLLAGKRTADGSEFEKRTADGSEFESPKKKAKVE

SEQ ID NO: 2861 - protein, 2091 aa, synthetic construct
  source 1..2091: note = Description of Artificial Sequence: Synthetic polypeptide
MPAAKRVKLDGGDKKYSIGLDIGTNSVGWAVITDEYKVPSKKFKVLGNTDRHSIKKNLIGALLFDSGETAEATRLKRTARRRYTRRKNRICYLQEIFSNEMAKVDDSFFHRLEESFLVEEDKKHERHPIFGNIVDEVAYHEKYPTIYHLRKKLVDSTDKADLRLIYLALAHMIKFRGHFLIEGDLNPDNSDVDKLFIQLVQTYNQLFEENPINASGVDAKAILSARLSKSRRLENLIAQLPGEKKNGLFGNLIALSLGLTPNFKSNFDLAEDAKLQLSKDTYDDDLDNLLAQIGDQYADLFLAAKNLSDAILLSDILRVNTEITKAPLSASMIKRYDEHHQDLTLLKALVRQQLPEKYKEIFFDQSKNGYAGYIDGGASQEEFYKFIKPILEKMDGTEELLVKLNREDLLRKQRTFDNGSIPHQIHLGELHAILRRQEDFYPFLKDNREKIEKILTFRIPYYVGPLARGNSRFAWMTRKSEETITPWNFEEVVDKGASAQSFIERMTNFDKNLPNEKVLPKHSLLYEYFTVYNELTKVKYVTEGMRKPAFLSGEQKKAIVDLLFKTNRKVTVKQLKEDYFKKIECFDSVEISGVEDRFNASLGTYHDLLKIIKDKDFLDNEENEDILEDIVLTLTLFEDREMIEERLKTYAHLFDDKVMKQLKRRRYTGWGRLSRKLINGIRDKQSGKTILDFLKSDGFANRNFMQLIHDDSLTFKEDIQKAQVSGQGDSLHEHIANLAGSPAIKKGILQTVKVVDELVKVMGRHKPENIVIEMARENQTTQKGQKNSRERMKRIEEGIKELGSQILKEHPVENTQLQNEKLYLYYLQNGRDMYVDQELDINRLSDYDVDHIVPQSFLKDDSIDNKVLTRSDKARGKSDNVPSEEVVKKMKNYWRQLLNAKLITQRKFDNLTKAERGGLSELDKAGFIKRQLVETRQITKHVAQILDSRMNTKYDENDKLIREVKVITLKSKLVSDFRKDFQFYKVREINNYHHAHDAYLNAVVGTALIKKYPKLESEFVYGDYKVYDVRKMIAKSEQEIGKATAKYFFYSNIMNFFKTEITLANGEIRKRPLIETNGETGEIVWDKGRDFATVRKVLSMPQVNIVKKTEVQTGGFSKESILPKRNSDKLIARKKDWDPKKYGGFDSPTVAYSVLVVAKVEKGKSKKLKSVKELLGITIMERSSFEKNPIDFLEAKGYKEVKKDLIIKLPKYSLFELENGRKRMLASAGELQKGNELALPSKYVNFLYLASHYEKLKGSPEDNEQKQLFVEQHKHYLDEIIEQISEFSKRVILADANLDKVLSAYNKHRDKPIREQAENIIHLFTLTNLGAPAAFKYFDTTIDRKRYTSTKEVLDATLIHQSITGLYETRIDLSQLGGDGGGGSGGGGGTLNIEDEHRLHETSKEPDVSLGSTWLSDFPQAWAETGGMGLAVRQAPLIIPLKATSTPVSIKQYPMSQEARLGIKPHIQRLLDQGILVPCQSPWNTPLLPVKKPGTNDYRPVQDLREVNKRVEDIHPTVPNPYNLLSGLPPSHQWYTVLDLKDAFFCLRLHPTSQPLFAFEWRDPEMGISGQLTWTRLPQGFKNSPTLFNEALHRDLADFRIQHPDLILLQYVDDLLLAATSELDCQQGTRALLQTLGNLGYRASAKKAQICQKQVKYLGYLLKEGQRWLTEARKETVMGQPTPKTPRQLREFLGKAGFCRLFIPGFAEMAAPLYPLTKPGTLFNWGPDQQKAYQEIKQALLTAPALGLPDLTKPFELFVDEKQGYAKGVLTQKLGPWRRPVAYLSKKLDPVAAGWPPCLRMVAAIAVLTKDAGKLTMGQPLVILAPHAVEALVKQPPDRWLSNARMTHYQALLLDTDRVQFGPVVALNPATLLPLPEEGLQHNCLDILAEAHGTRPDLTDQPLPDADHTWYTDGSSLLQEGQRKAGAAVTTETEVIWAKALPAGTSAQRAELIALTQALKMAEGKKLNVYTDSRYAFATAHIHGEIYRRRGWLTSEGKEIKNKDEILALLKALFLPKRLSIIHCPGHQKGHSAEARGNRMADQAARKAAITETPDTSTLLAGKRTADGSEFEKRTADGSEFESPKKKAKVE

SEQ ID NO: 2862 - protein, 2116 aa, synthetic construct; identical to SEQ ID NO: 2637
  source 1..2116: note = Description of Artificial Sequence: Synthetic polypeptide

SEQ ID NO: 2863 - protein, 2116 aa, synthetic construct
  source 1..2116: note = Description of Artificial Sequence: Synthetic polypeptide
MPAAKRVKLDGGDKKYSIGLDIGTNSVGWAVITDEYKVPSKKFKVLGNTDRHSIKKNLIGALLFDSGETAEATRLKRTARRRYTRRKNRICYLQEIFSNEMAKVDDSFFHRLEESFLVEEDKKHERHPIFGNIVDEVAYHEKYPTIYHLRKKLVDSTDKADLRLIYLALAHMIKFRGHFLIEGDLNPDNSDVDKLFIQLVQTYNQLFEENPINASGVDAKAILSARLSKSRRLENLIAQLPGEKKNGLFGNLIALSLGLTPNFKSNFDLAEDAKLQLSKDTYDDDLDNLLAQIGDQYADLFLAAKNLSDAILLSDILRVNTEITKAPLSASMIKRYDEHHQDLTLLKALVRQQLPEKYKEIFFDQSKNGYAGYIDGGASQEEFYKFIKPILEKMDGTEELLVKLNREDLLRKQRTFDNGSIPHQIHLGELHAILRRQEDFYPFLKDNREKIEKILTFRIPYYVGPLARGNSRFAWMTRKSEETITPWNFEEVVDKGASAQSFIERMTNFDKNLPNEKVLPKHSLLYEYFTVYNELTKVKYVTEGMRKPAFLSGEQKKAIVDLLFKTNRKVTVKQLKEDYFKKIECFDSVEISGVEDRFNASLGTYHDLLKIIKDKDFLDNEENEDILEDIVLTLTLFEDREMIEERLKTYAHLFDDKVMKQLKRRRYTGWGRLSRKLINGIRDKQSGKTILDFLKSDGFANRNFMQLIHDDSLTFKEDIQKAQVSGQGDSLHEHIANLAGSPAIKKGILQTVKVVDELVKVMGRHKPENIVIEMARENQTTQKGQKNSRERMKRIEEGIKELGSQILKEHPVENTQLQNEKLYLYYLQNGRDMYVDQELDINRLSDYDVDHIVPQSFLKDDSIDNKVLTRSDKARGKSDNVPSEEVVKKMKNYWRQLLNAKLITQRKFDNLTKAERGGLSELDKAGFIKRQLVETRQITKHVAQILDSRMNTKYDENDKLIREVKVITLKSKLVSDFRKDFQFYKVREINNYHHAHDAYLNAVVGTALIKKYPKLESEFVYGDYKVYDVRKMIAKSEQEIGKATAKYFFYSNIMNFFKTEITLANGEIRKRPLIETNGETGEIVWDKGRDFATVRKVLSMPQVNIVKKTEVQTGGFSKESILPKRNSDKLIARKKDWDPKKYGGFDSPTVAYSVLVVAKVEKGKSKKLKSVKELLGITIMERSSFEKNPIDFLEAKGYKEVKKDLIIKLPKYSLFELENGRKRMLASAGELQKGNELALPSKYVNFLYLASHYEKLKGSPEDNEQKQLFVEQHKHYLDEIIEQISEFSKRVILADANLDKVLSAYNKHRDKPIREQAENIIHLFTLTNLGAPAAFKYFDTTIDRKRYTSTKEVLDATLIHQSITGLYETRIDLSQLGGDGGEAAAKGGGGGSGGTLNIEDEYRLHETSKEPDVSLGSTWLSDFPQAWAETGGMGLAVRQAPLIIPLKATSTPVSIKQYPMSQEARLGIKPHIQRLLDQGILVPCQSPWNTPLLPVKKPGTNDYRPVQDLREVNKRVEDIHPTVPNPYNLLSGLPPSHQWYTVLDLKDAFFCLRLHPTSQPLFAFEWRDPEMGISGQLTWTRLPQGFKNSPTLFNEALHRDLADFRIQHPDLILLQYVDDLLLAATSELDCQQGTRALLQTLGNLGYRASAKKAQICQKQVKYLGYLLKEGQRWLTEARKETVMGQPTPKTPRQLREFLGKAGFCRLFIPGFAEMAAPLYPLTKPGTLFNWGPDQQKAYQEIKQALLTAPALGLPDLTKPFELFVDEKQGYAKGVLTQKLGPWRRPVAYLSKKLDPVAAGWPPCLRMVAAIAVLTKDAGKLTMGQPLVILAPHAVEALVKQPPDRWLSNARMTHYQALLLDTDRVQFGPVVALNPATLLPLPEEGLQHNCLDILAEAHGTRPDLTDQPLPDADHTWYTDGSSLLQEGQRKAGAAVTTETEVIWAKALPAGTSAQRAELIALTQALKMAEGKKLNVYTDSRYAFATAHIHGEIYRRRGWLTSEGKEIKNKDEILALLKALFLPKRLSIIHCPGHQKGHSAEARGNRMADQAARKAAITETPDTSTLLIENSSPSGGSKRTADGSEFEAGKRTADGSEFEKRTADGSEFESPKKKAKVE

SEQ ID NO: 2864 - protein, 2108 aa, synthetic construct; identical to SEQ ID NO: 2655
  source 1..2108: note = Description of Artificial Sequence: Synthetic polypeptide

SEQ ID NO: 2865 - protein, 2108 aa, synthetic construct; identical to SEQ ID NO: 2624
  source 1..2108: note = Description of Artificial Sequence: Synthetic polypeptide

SEQ ID NO: 2866 - protein, 2116 aa, synthetic construct; identical to SEQ ID NO: 2692
  source 1..2116: note = Description of Artificial Sequence: Synthetic polypeptide

SEQ ID NO: 2867 - protein, 2117 aa, synthetic construct; identical to SEQ ID NO: 2665
  source 1..2117: note = Description of Artificial Sequence: Synthetic polypeptide

SEQ ID NO: 2868 - protein, 2118 aa, synthetic construct
  source 1..2118: note = Description of Artificial Sequence: Synthetic polypeptide
MPAAKRVKLDGGDKKYSIGLDIGTNSVGWAVITDEYKVPSKKFKVLGNTDRHSIKKNLIGALLFDSGETAEATRLKRTARRRYTRRKNRICYLQEIFSNEMAKVDDSFFHRLEESFLVEEDKKHERHPIFGNIVDEVAYHEKYPTIYHLRKKLVDSTDKADLRLIYLALAHMIKFRGHFLIEGDLNPDNSDVDKLFIQLVQTYNQLFEENPINASGVDAKAILSARLSKSRRLENLIAQLPGEKKNGLFGNLIALSLGLTPNFKSNFDLAEDAKLQLSKDTYDDDLDNLLAQIGDQYADLFLAAKNLSDAILLSDILRVNTEITKAPLSASMIKRYDEHHQDLTLLKALVRQQLPEKYKEIFFDQSKNGYAGYIDGGASQEEFYKFIKPILEKMDGTEELLVKLNREDLLRKQRTFDNGSIPHQIHLGELHAILRRQEDFYPFLKDNREKIEKILTFRIPYYVGPLARGNSRFAWMTRKSEETITPWNFEEVVDKGASAQSFIERMTNFDKNLPNEKVLPKHSLLYEYFTVYNELTKVKYVTEGMRKPAFLSGEQKKAIVDLLFKTNRKVTVKQLKEDYFKKIECFDSVEISGVEDRFNASLGTYHDLLKIIKDKDFLDNEENEDILEDIVLTLTLFEDREMIEERLKTYAHLFDDKVMKQLKRRRYTGWGRLSRKLINGIRDKQSGKTILDFLKSDGFANRNFMQLIHDDSLTFKEDIQKAQVSGQGDSLHEHIANLAGSPAIKKGILQTVKVVDELVKVMGRHKPENIVIEMARENQTTQKGQKNSRERMKRIEEGIKELGSQILKEHPVENTQLQNEKLYLYYLQNGRDMYVDQELDINRLSDYDVDHIVPQSFLKDDSIDNKVLTRSDKARGKSDNVPSEEVVKKMKNYWRQLLNAKLITQRKFDNLTKAERGGLSELDKAGFIKRQLVETRQITKHVAQILDSRMNTKYDENDKLIREVKVITLKSKLVSDFRKDFQFYKVREINNYHHAHDAYLNAVVGTALIKKYPKLESEFVYGDYKVYDVRKMIAKSEQEIGKATAKYFFYSNIMNFFKTEITLANGEIRKRPLIETNGETGEIVWDKGRDFATVRKVLSMPQVNIVKKTEVQTGGFSKESILPKRNSDKLIARKKDWDPKKYGGFDSPTVAYSVLVVAKVEKGKSKKLKSVKELLGITIMERSSFEKNPIDFLEAKGYKEVKKDLIIKLPKYSLFELENGRKRMLASAGELQKGNELALPSKYVNFLYLASHYEKLKGSPEDNEQKQLFVEQHKHYLDEIIEQISEFSKRVILADANLDKVLSAYNKHRDKPIREQAENIIHLFTLTNLGAPAAFKYFDTTIDRKRYTSTKEVLDATLIHQSITGLYETRIDLSQLGGDGGPAPAPAPAPAPAPGGTLNIEDEYRLHETSKEPDVSLGSTWLSDFPQAWAETGGMGLAVRQAPLIIPLKATSTPVSIKQYPMSQEARLGIKPHIQRLLDQGILVPCQSPWNTPLLPVKKPGTNDYRPVQDLREVNKRVEDIHPTVPNPYNLLSGLPPSHQWYTVLDLKDAFFCLRLHPTSQPLFAFEWRDPEMGISGQLTWTRLPQGFKNSPTLFNEALHRDLADFRIQHPDLILLQYVDDLLLAATSELDCQQGTRALLQTLGNLGYRASAKKAQICQKQVKYLGYLLKEGQRWLTEARKETVMGQPTPKTPRQLREFLGKAGFCRLFIPGFAEMAAPLYPLTKPGTLFNWGPDQQKAYQEIKQALLTAPALGLPDLTKPFELFVDEKQGYAKGVLTQKLGPWRRPVAYLSKKLDPVAAGWPPCLRMVAAIAVLTKDAGKLTMGQPLVILAPHAVEALVKQPPDRWLSNARMTHYQALLLDTDRVQFGPVVALNPATLLPLPEEGLQHNCLDILAEAHGTRPDLTDQPLPDADHTWYTDGSSLLQEGQRKAGAAVTTETEVIWAKALPAGTSAQRAELIALTQALKMAEGKKLNVYTDSRYAFATAHIHGEIYRRRGWLTSEGKEIKNKDEILALLKALFLPKRLSIIHCPGHQKGHSAEARGNRMADQAARKAAITETPDTSTLLIENSSPSGGSKRTADGSEFEAGKRTADGSEFEKRTADGSEFESPKKKAKVE

SEQ ID NO: 2869 - protein, 2114 aa, synthetic construct
  source 1..2114: note = Description of Artificial Sequence: Synthetic polypeptide
MPAAKRVKLDGGDKKYSIGLDIGTNSVGWAVITDEYKVPSKKFKVLGNTDRHSIKKNLIGALLFDSGETAEATRLKRTARRRYTRRKNRICYLQEIFSNEMAKVDDSFFHRLEESFLVEEDKKHERHPIFGNIVDEVAYHEKYPTIYHLRKKLVDSTDKADLRLIYLALAHMIKFRGHFLIEGDLNPDNSDVDKLFIQLVQTYNQLFEENPINASGVDAKAILSARLSKSRRLENLIAQLPGEKKNGLFGNLIALSLGLTPNFKSNFDLAEDAKLQLSKDTYDDDLDNLLAQIGDQYADLFLAAKNLSDAILLSDILRVNTEITKAPLSASMIKRYDEHHQDLTLLKALVRQQLPEKYKEIFFDQSKNGYAGYIDGGASQEEFYKFIKPILEKMDGTEELLVKLNREDLLRKQRTFDNGSIPHQIHLGELHAILRRQEDFYPFLKDNREKIEKILTFRIPYYVGPLARGNSRFAWMTRKSEETITPWNFEEVVDKGASAQSFIERMTNFDKNLPNEKVLPKHSLLYEYFTVYNELTKVKYVTEGMRKPAFLSGEQKKAIVDLLFKTNRKVTVKQLKEDYFKKIECFDSVEISGVEDRFNASLGTYHDLLKIIKDKDFLDNEENEDILEDIVLTLTLFEDREMIEERLKTYAHLFDDKVMKQLKRRRYTGWGRLSRKLINGIRDKQSGKTILDFLKSDGFANRNFMQLIHDDSLTFKEDIQKAQVSGQGDSLHEHIANLAGSPAIKKGILQTVKVVDELVKVMGRHKPENIVIEMARENQTTQKGQKNSRERMKRIEEGIKELGSQILKEHPVENTQLQNEKLYLYYLQNGRDMYVDQELDINRLSDYDVDHIVPQSFLKDDSIDNKVLTRSDKARGKSDNVPSEEVVKKMKNYWRQLLNAKLITQRKFDNLTKAERGGLSELDKAGFIKRQLVETRQITKHVAQILDSRMNTKYDENDKLIREVKVITLKSKLVSDFRKDFQFYKVREINNYHHAHDAYLNAVVGTALIKKYPKLESEFVYGDYKVYDVRKMIAKSEQEIGKATAKYFFYSNIMNFFKTEITLANGEIRKRPLIETNGETGEIVWDKGRDFATVRKVLSMPQVNIVKKTEVQTGGFSKESILPKRNSDKLIARKKDWDPKKYGGFDSPTVAYSVLVVAKVEKGKSKKLKSVKELLGITIMERSSFEKNPIDFLEAKGYKEVKKDLIIKLPKYSLFELENGRKRMLASAGELQKGNELALPSKYVNFLYLASHYEKLKGSPEDNEQKQLFVEQHKHYLDEIIEQISEFSKRVILADANLDKVLSAYNKHRDKPIREQAENIIHLFTLTNLGAPAAFKYFDTTIDRKRYTSTKEVLDATLIHQSITGLYETRIDLSQLGGDGGPAPGGGGSSGGTLNIEDEYRLHETSKEPDVSLGSTWLSDFPQAWAETGGMGLAVRQAPLIIPLKATSTPVSIKQYPMSQEARLGIKPHIQRLLDQGILVPCQSPWNTPLLPVKKPGTNDYRPVQDLREVNKRVEDIHPTVPNPYNLLSGLPPSHQWYTVLDLKDAFFCLRLHPTSQPLFAFEWRDPEMGISGQLTWTRLPQGFKNSPTLFNEALHRDLADFRIQHPDLILLQYVDDLLLAATSELDCQQGTRALLQTLGNLGYRASAKKAQICQKQVKYLGYLLKEGQRWLTEARKETVMGQPTPKTPRQLREFLGKAGFCRLFIPGFAEMAAPLYPLTKPGTLFNWGPDQQKAYQEIKQALLTAPALGLPDLTKPFELFVDEKQGYAKGVLTQKLGPWRRPVAYLSKKLDPVAAGWPPCLRMVAAIAVLTKDAGKLTMGQPLVILAPHAVEALVKQPPDRWLSNARMTHYQALLLDTDRVQFGPVVALNPATLLPLPEEGLQHNCLDILAEAHGTRPDLTDQPLPDADHTWYTDGSSLLQEGQRKAGAAVTTETEVIWAKALPAGTSAQRAELIALTQALKMAEGKKLNVYTDSRYAFATAHIHGEIYRRRGWLTSEGKEIKNKDEILALLKALFLPKRLSIIHCPGHQKGHSAEARGNRMADQAARKAAITETPDTSTLLIENSSPSGGSKRTADGSEFEAGKRTADGSEFEKRTADGSEFESPKKKAKVE

SEQ ID NO: 2870 - protein, 2116 aa, synthetic construct; identical to SEQ ID NO: 2677
  source 1..2116: note = Description of Artificial Sequence: Synthetic polypeptide

SEQ ID NO: 2871 - protein, 2111 aa, synthetic construct; identical to SEQ ID NO: 2676
  source 1..2111: note = Description of Artificial Sequence: Synthetic polypeptide

SEQ ID NO: 2872 - protein, 2116 aa, synthetic construct
  source 1..2116: note = Description of Artificial Sequence: Synthetic polypeptide
MPAAKRVKLDGGDKKYSIGLDIGTNSVGWAVITDEYKVPSKKFKVLGNTDRHSIKKNLIGALLFDSGETAEATRLKRTARRRYTRRKNRICYLQEIFSNEMAKVDDSFFHRLEESFLVEEDKKHERHPIFGNIVDEVAYHEKYPTIYHLRKKLVDSTDKADLRLIYLALAHMIKFRGHFLIEGDLNPDNSDVDKLFIQLVQTYNQLFEENPINASGVDAKAILSARLSKSRRLENLIAQLPGEKKNGLFGNLIALSLGLTPNFKSNFDLAEDAKLQLSKDTYDDDLDNLLAQIGDQYADLFLAAKNLSDAILLSDILRVNTEITKAPLSASMIKRYDEHHQDLTLLKALVRQQLPEKYKEIFFDQSKNGYAGYIDGGASQEEFYKFIKPILEKMDGTEELLVKLNREDLLRKQRTFDNGSIPHQIHLGELHAILRRQEDFYPFLKDNREKIEKILTFRIPYYVGPLARGNSRFAWMTRKSEETITPWNFEEVVDKGASAQSFIERMTNFDKNLPNEKVLPKHSLLYEYFTVYNELTKVKYVTEGMRKPAFLSGEQKKAIVDLLFKTNRKVTVKQLKEDYFKKIECFDSVEISGVEDRFNASLGTYHDLLKIIKDKDFLDNEENEDILEDIVLTLTLFEDREMIEERLKTYAHLFDDKVMKQLKRRRYTGWGRLSRKLINGIRDKQSGKTILDFLKSDGFANRNFMQLIHDDSLTFKEDIQKAQVSGQGDSLHEHIANLAGSPAIKKGILQTVKVVDELVKVMGRHKPENIVIEMARENQTTQKGQKNSRERMKRIEEGIKELGSQILKEHPVENTQLQNEKLYLYYLQNGRDMYVDQELDINRLSDYDVDHIVPQSFLKDDSIDNKVLTRSDKARGKSDNVPSEEVVKKMKNYWRQLLNAKLITQRKFDNLTKAERGGLSELDKAGFIKRQLVETRQITKHVAQILDSRMNTKYDENDKLIREVKVITLKSKLVSDFRKDFQFYKVREINNYHHAHDAYLNAVVGTALIKKYPKLESEFVYGDYKVYDVRKMIAKSEQEIGKATAKYFFYSNIMNFFKTEITLANGEIRKRPLIETNGETGEIVWDKGRDFATVRKVLSMPQVNIVKKTEVQTGGFSKESILPKRNSDKLIARKKDWDPKKYGGFDSPTVAYSVLVVAKVEKGKSKKLKSVKELLGITIMERSSFEKNPIDFLEAKGYKEVKKDLIIKLPKYSLFELENGRKRMLASAGELQKGNELALPSKYVNFLYLASHYEKLKGSPEDNEQKQLFVEQHKHYLDEIIEQISEFSKRVILADANLDKVLSAYNKHRDKPIREQAENIIHLFTLTNLGAPAAFKYFDTTIDRKRYTSTKEVLDATLIHQSITGLYETRIDLSQLGGDGGPAPGGGEAAAKGGTLNIEDEYRLHETSKEPDVSLGSTWLSDFPQAWAETGGMGLAVRQAPLIIPLKATSTPVSIKQYPMSQEARLGIKPHIQRLLDQGILVPCQSPWNTPLLPVKKPGTNDYRPVQDLREVNKRVEDIHPTVPNPYNLLSGLPPSHQWYTVLDLKDAFFCLRLHPTSQPLFAFEWRDPEMGISGQLTWTRLPQGFKNSPTLFNEALHRDLADFRIQHPDLILLQYVDDLLLAATSELDCQQGTRALLQTLGNLGYRASAKKAQICQKQVKYLGYLLKEGQRWLTEARKETVMGQPTPKTPRQLREFLGKAGFCRLFIPGFAEMAAPLYPLTKPGTLFNWGPDQQKAYQEIKQALLTAPALGLPDLTKPFELFVDEKQGYAKGVLTQKLGPWRRPVAYLSKKLDPVAAGWPPCLRMVAAIAVLTKDAGKLTMGQPLVILAPHAVEALVKQPPDRWLSNARMTHYQALLLDTDRVQFGPVVALNPATLLPLPEEGLQHNCLDILAEAHGTRPDLTDQPLPDADHTWYTDGSSLLQEGQRKAGAAVTTETEVIWAKALPAGTSAQRAELIALTQALKMAEGKKLNVYTDSRYAFATAHIHGEIYRRRGWLTSEGKEIKNKDEILALLKALFLPKRLSIIHCPGHQKGHSAEARGNRMADQAARKAAITETPDTSTLLIENSSPSGGSKRTADGSEFEAGKRTADGSEFEKRTADGSEFESPKKKAKVE

SEQ ID NO: 2873 - protein, 2116 aa, synthetic construct; identical to SEQ ID NO: 2651
  source 1..2116: note = Description of Artificial Sequence: Synthetic polypeptide

SEQ ID NO: 2874 - protein, 2116 aa, synthetic construct; identical to SEQ ID NO: 2638
  source 1..2116: note = Description of Artificial Sequence: Synthetic polypeptide

SEQ ID NO: 2875 - protein, 2114 aa, synthetic construct; identical to SEQ ID NO: 2685
  source 1..2114: note = Description of Artificial Sequence: Synthetic polypeptide

SEQ ID NO: 2876 - protein, 2114 aa, synthetic construct; identical to SEQ ID NO: 2698
  source 1..2114: note = Description of Artificial Sequence: Synthetic polypeptide

SEQ ID NO: 2877 - protein, 2120 aa, synthetic construct; identical to SEQ ID NO: 2627
  source 1..2120: note = Description of Artificial Sequence: Synthetic polypeptide

SEQ ID NO: 2878 - protein, 2114 aa, synthetic construct; identical to SEQ ID NO: 2649
  source 1..2114: note = Description of Artificial Sequence: Synthetic polypeptide

SEQ ID NO: 2879 - protein, 2116 aa, synthetic construct
  source 1..2116: note = Description of Artificial Sequence: Synthetic polypeptide
MPAAKRVKLDGGDKKYSIGLDIGTNSVGWAVITDEYKVPSKKFKVLGNTDRHSIKKNLIGALLFDSGETAEATRLKRTARRRYTRRKNRICYLQEIFSNEMAKVDDSFFHRLEESFLVEEDKKHERHPIFGNIVDEVAYHEKYPTIYHLRKKLVDSTDKADLRLIYLALAHMIKFRGHFLIEGDLNPDNSDVDKLFIQLVQTYNQLFEENPINASGVDAKAILSARLSKSRRLENLIAQLPGEKKNGLFGNLIALSLGLTPNFKSNFDLAEDAKLQLSKDTYDDDLDNLLAQIGDQYADLFLAAKNLSDAILLSDILRVNTEITKAPLSASMIKRYDEHHQDLTLLKALVRQQLPEKYKEIFFDQSKNGYAGYIDGGASQEEFYKFIKPILEKMDGTEELLVKLNREDLLRKQRTFDNGSIPHQIHLGELHAILRRQEDFYPFLKDNREKIEKILTFRIPYYVGPLARGNSRFAWMTRKSEETITPWNFEEVVDKGASAQSFIERMTNFDKNLPNEKVLPKHSLLYEYFTVYNELTKVKYVTEGMRKPAFLSGEQKKAIVDLLFKTNRKVTVKQLKEDYFKKIECFDSVEISGVEDRFNASLGTYHDLLKIIKDKDFLDNEENEDILEDIVLTLTLFEDREMIEERLKTYAHLFDDKVMKQLKRRRYTGWGRLSRKLINGIRDKQSGKTILDFLKSDGFANRNFMQLIHDDSLTFKEDIQKAQVSGQGDSLHEHIANLAGSPAIKKGILQTVKVVDELVKVMGRHKPENIVIEMARENQTTQKGQKNSRERMKRIEEGIKELGSQILKEHPVENTQLQNEKLYLYYLQNGRDMYVDQELDINRLSDYDVDHIVPQSFLKDDSIDNKVLTRSDKARGKSDNVPSEEVVKKMKNYWRQLLNAKLITQRKFDNLTKAERGGLSELDKAGFIKRQLVETRQITKHVAQILDSRMNTKYDENDKLIREVKVITLKSKLVSDFRKDFQFYKVREINNYHHAHDAYLNAVVGTALIKKYPKLESEFVYGDYKVYDVRKMIAKSEQEIGKATAKYFFYSNIMNFFKTEITLANGEIRKRPLIETNGETGEIVWDKGRDFATVRKVLSMPQVNIVKKTEVQTGGFSKESILPKRNSDKLIARKKDWDPKKYGGFDSPTVAYSVLVVAKVEKGKSKKLKSVKELLGITIMERSSFEKNPIDFLEAKGYKEVKKDLIIKLPKYSLFELENGRKRMLASAGELQKGNELALPSKYVNFLYLASHYEKLKGSPEDNEQKQLFVEQHKHYLDEIIEQISEFSKRVILADANLDKVLSAYNKHRDKPIREQAENIIHLFTLTNLGAPAAFKYFDTTIDRKRYTSTKEVLDATLIHQSITGLYETRIDLSQLGGDGGGGGEAAAKPAPGGTLNIEDEYRLHETSKEPDVSLGSTWLSDFPQAWAETGGMGLAVRQAPLIIPLKATSTPVSIKQYPMSQEARLGIKPHIQRLLDQGILVPCQSPWNTPLLPVKKPGTNDYRPVQDLREVNKRVEDIHPTVPNPYNLLSGLPPSHQWYTVLDLKDAFFCLRLHPTSQPLFAFEWRDPEMGISGQLTWTRLPQGFKNSPTLFNEALHRDLADFRIQHPDLILLQYVDDLLLAATSELDCQQGTRALLQTLGNLGYRASAKKAQICQKQVKYLGYLLKEGQRWLTEARKETVMGQPTPKTPRQLREFLGKAGFCRLFIPGFAEMAAPLYPLTKPGTLFNWGPDQQKAYQEIKQALLTAPALGLPDLTKPFELFVDEKQGYAKGVLTQKLGPWRRPVAYLSKKLDPVAAGWPPCLRMVAAIAVLTKDAGKLTMGQPLVILAPHAVEALVKQPPDRWLSNARMTHYQALLLDTDRVQFGPVVALNPATLLPLPEEGLQHNCLDILAEAHGTRPDLTDQPLPDADHTWYTDGSSLLQEGQRKAGAAVTTETEVIWAKALPAGTSAQRAELIALTQALKMAEGKKLNVYTDSRYAFATAHIHGEIYRRRGWLTSEGKEIKNKDEILALLKALFLPKRLSIIHCPGHQKGHSAEARGNRMADQAARKAAITETPDTSTLLIENSSPSGGSKRTADGSEFEAGKRTADGSEFEKRTADGSEFESPKKKAKVE

SEQ ID NO: 2880 - protein, 2130 aa, synthetic construct; identical to SEQ ID NO: 2678
  source 1..2130: note = Description of Artificial Sequence: Synthetic polypeptide

SEQ ID NO: 2881 - protein, 2110 aa, synthetic construct; identical to SEQ ID NO: 2620
  source 1..2110: note = Description of Artificial Sequence: Synthetic polypeptide

SEQ ID NO: 2882 - protein, 2117 aa, synthetic construct; identical to SEQ ID NO: 2687
  source 1..2117: note = Description of Artificial Sequence: Synthetic polypeptide

SEQ ID NO: 2883 - protein, 2113 aa, synthetic construct
  source 1..2113: note = Description of Artificial Sequence: Synthetic polypeptide
MPAAKRVKLDGGDKKYSIGLDIGTNSVGWAVITDEYKVPSKKFKVLGNTDRHSIKKNLIGALLFDSGETAEATRLKRTARRRYTRRKNRICYLQEIFSNEMAKVDDSFFHRLEESFLVEEDKKHERHPIFGNIVDEVAYHEKYPTIYHLRKKLVDSTDKADLRLIYLALAHMIKFRGHFLIEGDLNPDNSDVDKLFIQLVQTYNQLFEENPINASGVDAKAILSARLSKSRRLENLIAQLPGEKKNGLFGNLIALSLGLTPNFKSNFDLAEDAKLQLSKDTYDDDLDNLLAQIGDQYADLFLAAKNLSDAILLSDILRVNTEITKAPLSASMIKRYDEHHQDLTLLKALVRQQLPEKYKEIFFDQSKNGYAGYIDGGASQEEFYKFIKPILEKMDGTEELLVKLNREDLLRKQRTFDNGSIPHQIHLGELHAILRRQEDFYPFLKDNREKIEKILTFRIPYYVGPLARGNSRFAWMTRKSEETITPWNFEEVVDKGASAQSFIERMTNFDKNLPNEKVLPKHSLLYEYFTVYNELTKVKYVTEGMRKPAFLSGEQKKAIVDLLFKTNRKVTVKQLKEDYFKKIECFDSVEISGVEDRFNASLGTYHDLLKIIKDKDFLDNEENEDILEDIVLTLTLFEDREMIEERLKTYAHLFDDKVMKQLKRRRYTGWGRLSRKLINGIRDKQSGKTILDFLKSDGFANRNFMQLIHDDSLTFKEDIQKAQVSGQGDSLHEHIANLAGSPAIKKGILQTVKVVDELVKVMGRHKPENIVIEMARENQTTQKGQKNSRERMKRIEEGIKELGSQILKEHPVENTQLQNEKLYLYYLQNGRDMYVDQELDINRLSDYDVDHIVPQSFLKDDSIDNKVLTRSDKARGKSDNVPSEEVVKKMKNYWRQLLNAKLITQRKFDNLTKAERGGLSELDKAGFIKRQLVETRQITKHVAQILDSRMNTKYDENDKLIREVKVITLKSKLVSDFRKDFQFYKVREINNYHHAHDAYLNAVVGTALIKKYPKLESEFVYGDYKVYDVRKMIAKSEQEIGKATAKYFFYSNIMNFFKTEITLANGEIRKRPLIETNGETGEIVWDKGRDFATVRKVLSMPQVNIVKKTEVQTGGFSKESILPKRNSDKLIARKKDWDPKKYGGFDSPTVAYSVLVVAKVEKGKSKKLKSVKELLGITIMERSSFEKNPIDFLEAKGYKEVKKDLIIKLPKYSLFELENGRKRMLASAGELQKGNELALPSKYVNFLYLASHYEKLKGSPEDNEQKQLFVEQHKHYLDEIIEQISEFSKRVILADANLDKVLSAYNKHRDKPIREQAENIIHLFTLTNLGAPAAFKYFDTTIDRKRYTSTKEVLDATLIHQSITGLYETRIDLSQLGGDGGPAPEAAAKGGTLNIEDEYRLHETSKEPDVSLGSTWLSDFPQAWAETGGMGLAVRQAPLIIPLKATSTPVSIKQYPMSQEARLGIKPHIQRLLDQGILVPCQSPWNTPLLPVKKPGTNDYRPVQDLREVNKRVEDIHPTVPNPYNLLSGLPPSHQWYTVLDLKDAFFCLRLHPTSQPLFAFEWRDPEMGISGQLTWTRLPQGFKNSPTLFNEALHRDLADFRIQHPDLILLQYVDDLLLAATSELDCQQGTRALLQTLGNLGYRASAKKAQICQKQVKYLGYLLKEGQRWLTEARKETVMGQPTPKTPRQLREFLGKAGFCRLFIPGFAEMAAPLYPLTKPGTLFNWGPDQQKAYQEIKQALLTAPALGLPDLTKPFELFVDEKQGYAKGVLTQKLGPWRRPVAYLSKKLDPVAAGWPPCLRMVAAIAVLTKDAGKLTMGQPLVILAPHAVEALVKQPPDRWLSNARMTHYQALLLDTDRVQFGPVVALNPATLLPLPEEGLQHNCLDILAEAHGTRPDLTDQPLPDADHTWYTDGSSLLQEGQRKAGAAVTTETEVIWAKALPAGTSAQRAELIALTQALKMAEGKKLNVYTDSRYAFATAHIHGEIYRRRGWLTSEGKEIKNKDEILALLKALFLPKRLSIIHCPGHQKGHSAEARGNRMADQAARKAAITETPDTSTLLIENSSPSGGSKRTADGSEFEAGKRTADGSEFEKRTADGSEFESPKKKAKVE

SEQ ID NO: 2884 - protein, 2116 aa, synthetic construct; identical to SEQ ID NO: 2674
  source 1..2116: note = Description of Artificial Sequence: Synthetic polypeptide

SEQ ID NO: 2885 - protein, 2116 aa, synthetic construct; identical to SEQ ID NO: 2688
  source 1..2116: note = Description of Artificial Sequence: Synthetic polypeptide

SEQ ID NO: 2886 - protein, 2111 aa, synthetic construct; identical to SEQ ID NO: 2653
  source 1..2111: note = Description of Artificial Sequence: Synthetic polypeptide

SEQ ID NO: 2887 - protein, 2115 aa, synthetic construct; identical to SEQ ID NO: 2647
  source 1..2115: note = Description of Artificial Sequence: Synthetic polypeptide

SEQ ID NO: 2888 - protein, 2125 aa, synthetic construct; identical to SEQ ID NO: 2610
  source 1..2125: note = Description of Artificial Sequence: Synthetic polypeptide

SEQ ID NO: 2889 - protein, 2116 aa, synthetic construct; identical to SEQ ID NO: 2683
  source 1..2116: note = Description of Artificial Sequence: Synthetic polypeptide

SEQ ID NO: 2890 - protein, 2114 aa, synthetic construct; identical to SEQ ID NO: 2633
  source 1..2114: note = Description of Artificial Sequence: Synthetic polypeptide

SEQ ID NO: 2891 - protein, 2116 aa, synthetic construct; identical to SEQ ID NO: 2641
  source 1..2116: note = Description of Artificial Sequence: Synthetic polypeptide

SEQ ID NO: 2892 - protein, 2138 aa, synthetic construct
  source 1..2138: note = Description of Artificial Sequence: Synthetic polypeptide
MPAAKRVKLDGGDKKYSIGLDIGTNSVGWAVITDEYKVPSKKFKVLGNTDRHSIKKNLIGALLFDSGETAEATRLKRTARRRYTRRKNRICYLQEIFSNEMAKVDDSFFHRLEESFLVEEDKKHERHPIFGNIVDEVAYHEKYPTIYHLRKKLVDSTDKADLRLIYLALAHMIKFRGHFLIEGDLNPDNSDVDKLFIQLVQTYNQLFEENPINASGVDAKAILSARLSKSRRLENLIAQLPGEKKNGLFGNLIALSLGLTPNFKSNFDLAEDAKLQLSKDTYDDDLDNLLAQIGDQYADLFLAAKNLSDAILLSDILRVNTEITKAPLSASMIKRYDEHHQDLTLLKALVRQQLPEKYKEIFFDQSKNGYAGYIDGGASQEEFYKFIKPILEKMDGTEELLVKLNREDLLRKQRTFDNGSIPHQIHLGELHAILRRQEDFYPFLKDNREKIEKILTFRIPYYVGPLARGNSRFAWMTRKSEETITPWNFEEVVDKGASAQSFIERMTNFDKNLPNEKVLPKHSLLYEYFTVYNELTKVKYVTEGMRKPAFLSGEQKKAIVDLLFKTNRKVTVKQLKEDYFKKIECFDSVEISGVEDRFNASLGTYHDLLKIIKDKDFLDNEENEDILEDIVLTLTLFEDREMIEERLKTYAHLFDDKVMKQLKRRRYTGWGRLSRKLINGIRDKQSGKTILDFLKSDGFANRNFMQLIHDDSLTFKEDIQKAQVSGQGDSLHEHIANLAGSPAIKKGILQTVKVVDELVKVMGRHKPENIVIEMARENQTTQKGQKNSRERMKRIEEGIKELGSQILKEHPVENTQLQNEKLYLYYLQNGRDMYVDQELDINRLSDYDVDHIVPQSFLKDDSIDNKVLTRSDKARGKSDNVPSEEVVKKMKNYWRQLLNAKLITQRKFDNLTKAERGGLSELDKAGFIKRQLVETRQITKHVAQILDSRMNTKYDENDKLIREVKVITLKSKLVSDFRKDFQFYKVREINNYHHAHDAYLNAVVGTALIKKYPKLESEFVYGDYKVYDVRKMIAKSEQEIGKATAKYFFYSNIMNFFKTEITLANGEIRKRPLIETNGETGEIVWDKGRDFATVRKVLSMPQVNIVKKTEVQTGGFSKESILPKRNSDKLIARKKDWDPKKYGGFDSPTVAYSVLVVAKVEKGKSKKLKSVKELLGITIMERSSFEKNPIDFLEAKGYKEVKKDLIIKLPKYSLFELENGRKRMLASAGELQKGNELALPSKYVNFLYLASHYEKLKGSPEDNEQKQLFVEQHKHYLDEIIEQISEFSKRVILADANLDKVLSAYNKHRDKPIREQAENIIHLFTLTNLGAPAAFKYFDTTIDRKRYTSTKEVLDATLIHQSITGLYETRIDLSQLGGDGGSGGSSGGSSGSETPGTSESATPESSGGSSGGSSGGTLNIEDEYRLHETSKEPDVSLGSTWLSDFPQAWAETGGMGLAVRQAPLIIPLKATSTPVSIKQYPMSQEARLGIKPHIQRLLDQGILVPCQSPWNTPLLPVKKPGTNDYRPVQDLREVNKRVEDIHPTVPNPYNLLSGLPPSHQWYTVLDLKDAFFCLRLHPTSQPLFAFEWRDPEMGISGQLTWTRLPQGFKNSPTLFNEALHRDLADFRIQHPDLILLQYVDDLLLAATSELDCQQGTRALLQTLGNLGYRASAKKAQICQKQVKYLGYLLKEGQRWLTEARKETVMGQPTPKTPRQLREFLGKAGFCRLFIPGFAEMAAPLYPLTKPGTLFNWGPDQQKAYQEIKQALLTAPALGLPDLTKPFELFVDEKQGYAKGVLTQKLGPWRRPVAYLSKKLDPVAAGWPPCLRMVAAIAVLTKDAGKLTMGQPLVILAPHAVEALVKQPPDRWLSNARMTHYQALLLDTDRVQFGPVVALNPATLLPLPEEGLQHNCLDILAEAHGTRPDLTDQPLPDADHTWYTDGSSLLQEGQRKAGAAVTTETEVIWAKALPAGTSAQRAELIALTQALKMAEGKKLNVYTDSRYAFATAHIHGEIYRRRGWLTSEGKEIKNKDEILALLKALFLPKRLSIIHCPGHQKGHSAEARGNRMADQAARKAAITETPDTSTLLIENSSPSGGSKRTADGSEFEAGKRTADGSEFEKRTADGSEFESPKKKAKVE

SEQ ID NO: 2893 - protein, 2116 aa, synthetic construct; identical to SEQ ID NO: 2701
  source 1..2116: note = Description of Artificial Sequence: Synthetic polypeptide

SEQ ID NO: 2894 - protein, 2114 aa, synthetic construct; identical to SEQ ID NO: 2684
  source 1..2114: note = Description of Artificial Sequence: Synthetic polypeptide

SEQ ID NO: 2895 - protein, 2114 aa, synthetic construct; identical to SEQ ID NO: 2622
  source 1..2114: note = Description of Artificial Sequence: Synthetic polypeptide

SEQ ID NO: 2896 - protein, 2116 aa, synthetic construct; identical to SEQ ID NO: 2645
  source 1..2116: note = Description of Artificial Sequence: Synthetic polypeptide

SEQ ID NO: 2897 - protein, 2116 aa, synthetic construct; identical to SEQ ID NO: 2658
  source 1..2116: note = Description of Artificial Sequence: Synthetic polypeptide

SEQ ID NO: 2898 - protein, 2114 aa, synthetic construct; identical to SEQ ID NO: 2670
  source 1..2114: note = Description of Artificial Sequence: Synthetic polypeptide

SEQ ID NO: 2899 - protein, 2110 aa, synthetic construct
  source 1..2110: note = Description of Artificial Sequence: Synthetic polypeptide
MPAAKRVKLDGGDKKYSIGLDIGTNSVGWAVITDEYKVPSKKFKVLGNTDRHSIKKNLIGALLFDSGETAEATRLKRTARRRYTRRKNRICYLQEIFSNEMAKVDDSFFHRLEESFLVEEDKKHERHPIFGNIVDEVAYHEKYPTIYHLRKKLVDSTDKADLRLIYLALAHMIKFRGHFLIEGDLNPDNSDVDKLFIQLVQTYNQLFEENPINASGVDAKAILSARLSKSRRLENLIAQLPGEKKNGLFGNLIALSLGLTPNFKSNFDLAEDAKLQLSKDTYDDDLDNLLAQIGDQYADLFLAAKNLSDAILLSDILRVNTEITKAPLSASMIKRYDEHHQDLTLLKALVRQQLPEKYKEIFFDQSKNGYAGYIDGGASQEEFYKFIKPILEKMDGTEELLVKLNREDLLRKQRTFDNGSIPHQIHLGELHAILRRQEDFYPFLKDNREKIEKILTFRIPYYVGPLARGNSRFAWMTRKSEETITPWNFEEVVDKGASAQSFIERMTNFDKNLPNEKVLPKHSLLYEYFTVYNELTKVKYVTEGMRKPAFLSGEQKKAIVDLLFKTNRKVTVKQLKEDYFKKIECFDSVEISGVEDRFNASLGTYHDLLKIIKDKDFLDNEENEDILEDIVLTLTLFEDREMIEERLKTYAHLFDDKVMKQLKRRRYTGWGRLSRKLINGIRDKQSGKTILDFLKSDGFANRNFMQLIHDDSLTFKEDIQKAQVSGQGDSLHEHIANLAGSPAIKKGILQTVKVVDELVKVMGRHKPENIVIEMARENQTTQKGQKNSRERMKRIEEGIKELGSQILKEHPVENTQLQNEKLYLYYLQNGRDMYVDQELDINRLSDYDVDHIVPQSFLKDDSIDNKVLTRSDKARGKSDNVPSEEVVKKMKNYWRQLLNAKLITQRKFDNLTKAERGGLSELDKAGFIKRQLVETRQITKHVAQILDSRMNTKYDENDKLIREVKVITLKSKLVSDFRKDFQFYKVREINNYHHAHDAYLNAVVGTALIKKYPKLESEFVYGDYKVYDVRKMIAKSEQEIGKATAKYFFYSNIMNFFKTEITLANGEIRKRPLIETNGETGEIVWDKGRDFATVRKVLSMPQVNIVKKTEVQTGGFSKESILPKRNSDKLIARKKDWDPKKYGGFDSPTVAYSVLVVAKVEKGKSKKLKSVKELLGITIMERSSFEKNPIDFLEAKGYKEVKKDLIIKLPKYSLFELENGRKRMLASAGELQKGNELALPSKYVNFLYLASHYEKLKGSPEDNEQKQLFVEQHKHYLDEIIEQISEFSKRVILADANLDKVLSAYNKHRDKPIREQAENIIHLFTLTNLGAPAAFKYFDTTIDRKRYTSTKEVLDATLIHQSITGLYETRIDLSQLGGDGGGGGGGGGTLNIEDEYRLHETSKEPDVSLGSTWLSDFPQAWAETGGMGLAVRQAPLIIPLKATSTPVSIKQYPMSQEARLGIKPHIQRLLDQGILVPCQSPWNTPLLPVKKPGTNDYRPVQDLREVNKRVEDIHPTVPNPYNLLSGLPPSHQWYTVLDLKDAFFCLRLHPTSQPLFAFEWRDPEMGISGQLTWTRLPQGFKNSPTLFNEALHRDLADFRIQHPDLILLQYVDDLLLAATSELDCQQGTRALLQTLGNLGYRASAKKAQICQKQVKYLGYLLKEGQRWLTEARKETVMGQPTPKTPRQLREFLGKAGFCRLFIPGFAEMAAPLYPLTKPGTLFNWGPDQQKAYQEIKQALLTAPALGLPDLTKPFELFVDEKQGYAKGVLTQKLGPWRRPVAYLSKKLDPVAAGWPPCLRMVAAIAVLTKDAGKLTMGQPLVILAPHAVEALVKQPPDRWLSNARMTHYQALLLDTDRVQFGPVVALNPATLLPLPEEGLQHNCLDILAEAHGTRPDLTDQPLPDADHTWYTDGSSLLQEGQRKAGAAVTTETEVIWAKALPAGTSAQRAELIALTQALKMAEGKKLNVYTDSRYAFATAHIHGEIYRRRGWLTSEGKEIKNKDEILALLKALFLPKRLSIIHCPGHQKGHSAEARGNRMADQAARKAAITETPDTSTLLIENSSPSGGSKRTADGSEFEAGKRTADGSEFEKRTADGSEFESPKKKAKVE

SEQ ID NO: 2900 - protein, 2120 aa, synthetic construct; identical to SEQ ID NO: 2662
  source 1..2120: note = Description of Artificial Sequence: Synthetic polypeptide

SEQ ID NO: 2901 - protein, 2116 aa, synthetic construct; identical to SEQ ID NO: 2629
  source 1..2116: note = Description of Artificial Sequence: Synthetic polypeptide

SEQ ID NO: 2902 - protein, 2117 aa, synthetic construct; identical to SEQ ID NO: 2696
  source 1..2117: note = Description of Artificial Sequence: Synthetic polypeptide

SEQ ID NO: 2903 - protein, 2114 aa, synthetic construct; identical to SEQ ID NO: 2634
  source 1..2114: note = Description of Artificial Sequence: Synthetic polypeptide

SEQ ID NO: 2904 - protein, 2114 aa, synthetic construct; identical to SEQ ID NO: 2618
  source 1..2114: note = Description of Artificial Sequence: Synthetic polypeptide

SEQ ID NO: 2905 - protein, 2111 aa, synthetic construct
  source 1..2111: note = Description of Artificial Sequence: Synthetic polypeptide
MPAAKRVKLDGGDKKYSIGLDIGTNSVGWAVITDEYKVPSKKFKVLGNTDRHSIKKNLIGALLFDSGETAEATRLKRTARRRYTRRKNRICYLQEIFSNEMAKVDDSFFHRLEESFLVEEDKKHERHPIFGNIVDEVAYHEKYPTIYHLRKKLVDSTDKADLRLIYLALAHMIKFRGHFLIEGDLNPDNSDVDKLFIQLVQTYNQLFEENPINASGVDAKAILSARLSKSRRLENLIAQLPGEKKNGLFGNLIALSLGLTPNFKSNFDLAEDAKLQLSKDTYDDDLDNLLAQIGDQYADLFLAAKNLSDAILLSDILRVNTEITKAPLSASMIKRYDEHHQDLTLLKALVRQQLPEKYKEIFFDQSKNGYAGYIDGGASQEEFYKFIKPILEKMDGTEELLVKLNREDLLRKQRTFDNGSIPHQIHLGELHAILRRQEDFYPFLKDNREKIEKILTFRIPYYVGPLARGNSRFAWMTRKSEETITPWNFEEVVDKGASAQSFIERMTNFDKNLPNEKVLPKHSLLYEYFTVYNELTKVKYVTEGMRKPAFLSGEQKKAIVDLLFKTNRKVTVKQLKEDYFKKIECFDSVEISGVEDRFNASLGTYHDLLKIIKDKDFLDNEENEDILEDIVLTLTLFEDREMIEERLKTYAHLFDDKVMKQLKRRRYTGWGRLSRKLINGIRDKQSGKTILDFLKSDGFANRNFMQLIHDDSLTFKEDIQKAQVSGQGDSLHEHIANLAGSPAIKKGILQTVKVVDELVKVMGRHKPENIVIEMARENQTTQKGQKNSRERMKRIEEGIKELGSQILKEHPVENTQLQNEKLYLYYLQNGRDMYVDQELDINRLSDYDVDHIVPQSFLKDDSIDNKVLTRSDKARGKSDNVPSEEVVKKMKNYWRQLLNAKLITQRKFDNLTKAERGGLSELDKAGFIKRQLVETRQITKHVAQILDSRMNTKYDENDKLIREVKVITLKSKLVSDFRKDFQFYKVREINNYHHAHDAYLNAVVGTALIKKYPKLESEFVYGDYKVYDVRKMIAKSEQEIGKATAKYFFYSNIMNFFKTEITLANGEIRKRPLIETNGETGEIVWDKGRDFATVRKVLSMPQVNIVKKTEVQTGGFSKESILPKRNSDKLIARKKDWDPKKYGGFDSPTVAYSVLVVAKVEKGKSKKLKSVKELLGITIMERSSFEKNPIDFLEAKGYKEVKKDLIIKLPKYSLFELENGRKRMLASAGELQKGNELALPSKYVNFLYLASHYEKLKGSPEDNEQKQLFVEQHKHYLDEIIEQISEFSKRVILADANLDKVLSAYNKHRDKPIREQAENIIHLFTLTNLGAPAAFKYFDTTIDRKRYTSTKEVLDATLIHQSITGLYETRIDLSQLGGDGGGSSGSSGGTLNIEDEYRLHETSKEPDVSLGSTWLSDFPQAWAETGGMGLAVRQAPLIIPLKATSTPVSIKQYPMSQEARLGIKPHIQRLLDQGILVPCQSPWNTPLLPVKKPGTNDYRPVQDLREVNKRVEDIHPTVPNPYNLLSGLPPSHQWYTVLDLKDAFFCLRLHPTSQPLFAFEWRDPEMGISGQLTWTRLPQGFKNSPTLFNEALHRDLADFRIQHPDLILLQYVDDLLLAATSELDCQQGTRALLQTLGNLGYRASAKKAQICQKQVKYLGYLLKEGQRWLTEARKETVMGQPTPKTPRQLREFLGKAGFCRLFIPGFAEMAAPLYPLTKPGTLFNWGPDQQKAYQEIKQALLTAPALGLPDLTKPFELFVDEKQGYAKGVLTQKLGPWRRPVAYLSKKLDPVAAGWPPCLRMVAAIAVLTKDAGKLTMGQPLVILAPHAVEALVKQPPDRWLSNARMTHYQALLLDTDRVQFGPVVALNPATLLPLPEEGLQHNCLDILAEAHGTRPDLTDQPLPDADHTWYTDGSSLLQEGQRKAGAAVTTETEVIWAKALPAGTSAQRAELIALTQALKMAEGKKLNVYTDSRYAFATAHIHGEIYRRRGWLTSEGKEIKNKDEILALLKALFLPKRLSIIHCPGHQKGHSAEARGNRMADQAARKAAITETPDTSTLLIENSSPSGGSKRTADGSEFEAGKRTADGSEFEKRTADGSEFESPKKKAKVE

SEQ ID NO: 2906 - protein, 2111 aa, synthetic construct; identical to SEQ ID NO: 2643
  source 1..2111: note = Description of Artificial Sequence: Synthetic polypeptide

SEQ ID NO: 2907 - protein, 2121 aa, synthetic construct; identical to SEQ ID NO: 2663
  source 1..2121: note = Description of Artificial Sequence: Synthetic polypeptide

SEQ ID NO: 2908 - protein, 2113 aa, synthetic construct; identical to SEQ ID NO: 2626
  source 1..2113: note = Description of Artificial Sequence: Synthetic polypeptide

SEQ ID NO: 2909 - protein, 2115 aa, synthetic construct; identical to SEQ ID NO: 2639
  source 1..2115: note = Description of Artificial Sequence: Synthetic polypeptide

SEQ ID NO: 2910 - protein, 2111 aa, synthetic construct; identical to SEQ ID NO: 2671
  source 1..2111: note = Description of Artificial Sequence: Synthetic polypeptide

SEQ ID NO: 2911 - protein, 2111 aa, synthetic construct; identical to SEQ ID NO: 2672
  source 1..2111: note = Description of Artificial Sequence: Synthetic polypeptide

SEQ ID NO: 2912 - protein, 2116 aa, synthetic construct; identical to SEQ ID NO: 2703
  source 1..2116: note = Description of Artificial Sequence: Synthetic polypeptide

SEQ ID NO: 2913 - protein, 2116 aa, synthetic construct; identical to SEQ ID NO: 2660
  source 1..2116: note = Description of Artificial Sequence: Synthetic polypeptide

SEQ ID NO: 2914 - protein, 2111 aa, synthetic construct
  source 1..2111: note = Description of Artificial Sequence: Synthetic polypeptide
MPAAKRVKLDGGDKKYSIGLDIGTNSVGWAVITDEYKVPSKKFKVLGNTDRHSIKKNLIGALLFDSGETAEATRLKRTARRRYTRRKNRICYLQEIFSNEMAKVDDSFFHRLEESFLVEEDKKHERHPIFGNIVDEVAYHEKYPTIYHLRKKLVDSTDKADLRLIYLALAHMIKFRGHFLIEGDLNPDNSDVDKLFIQLVQTYNQLFEENPINASGVDAKAILSARLSKSRRLENLIAQLPGEKKNGLFGNLIALSLGLTPNFKSNFDLAEDAKLQLSKDTYDDDLDNLLAQIGDQYADLFLAAKNLSDAILLSDILRVNTEITKAPLSASMIKRYDEHHQDLTLLKALVRQQLPEKYKEIFFDQSKNGYAGYIDGGASQEEFYKFIKPILEKMDGTEELLVKLNREDLLRKQRTFDNGSIPHQIHLGELHAILRRQEDFYPFLKDNREKIEKILTFRIPYYVGPLARGNSRFAWMTRKSEETITPWNFEEVVDKGASAQSFIERMTNFDKNLPNEKVLPKHSLLYEYFTVYNELTKVKYVTEGMRKPAFLSGEQKKAIVDLLFKTNRKVTVKQLKEDYFKKIECFDSVEISGVEDRFNASLGTYHDLLKIIKDKDFLDNEENEDILEDIVLTLTLFEDREMIEERLKTYAHLFDDKVMKQLKRRRYTGWGRLSRKLINGIRDKQSGKTILDFLKSDGFANRNFMQLIHDDSLTFKEDIQKAQVSGQGDSLHEHIANLAGSPAIKKGILQTVKVVDELVKVMGRHKPENIVIEMARENQTTQKGQKNSRERMKRIEEGIKELGSQILKEHPVENTQLQNEKLYLYYLQNGRDMYVDQELDINRLSDYDVDHIVPQSFLKDDSIDNKVLTRSDKARGKSDNVPSEEVVKKMKNYWRQLLNAKLITQRKFDNLTKAERGGLSELDKAGFIKRQLVETRQITKHVAQILDSRMNTKYDENDKLIREVKVITLKSKLVSDFRKDFQFYKVREINNYHHAHDAYLNAVVGTALIKKYPKLESEFVYGDYKVYDVRKMIAKSEQEIGKATAKYFFYSNIMNFFKTEITLANGEIRKRPLIETNGETGEIVWDKGRDFATVRKVLSMPQVNIVKKTEVQTGGFSKESILPKRNSDKLIARKKDWDPKKYGGFDSPTVAYSVLVVAKVEKGKSKKLKSVKELLGITIMERSSFEKNPIDFLEAKGYKEVKKDLIIKLPKYSLFELENGRKRMLASAGELQKGNELALPSKYVNFLYLASHYEKLKGSPEDNEQKQLFVEQHKHYLDEIIEQISEFSKRVILADANLDKVLSAYNKHRDKPIREQAENIIHLFTLTNLGAPAAFKYFDTTIDRKRYTSTKEVLDATLIHQSITGLYETRIDLSQLGGDGGGGSGSSGGTLNIEDEYRLHETSKEPDVSLGSTWLSDFPQAWAETGGMGLAVRQAPLIIPLKATSTPVSIKQYPMSQEARLGIKPHIQRLLDQGILVPCQSPWNTPLLPVKKPGTNDYRPVQDLREVNKRVEDIHPTVPNPYNLLSGLPPSHQWYTVLDLKDAFFCLRLHPTSQPLFAFEWRDPEMGISGQLTWTRLPQGFKNSPTLFNEALHRDLADFRIQHPDLILLQYVDDLLLAATSELDCQQGTRALLQTLGNLGYRASAKKAQICQKQVKYLGYLLKEGQRWLTEARKETVMGQPTPKTPRQLREFLGKAGFCRLFIPGFAEMAAPLYPLTKPGTLFNWGPDQQKAYQEIKQALLTAPALGLPDLTKPFELFVDEKQGYAKGVLTQKLGPWRRPVAYLSKKLDPVAAGWPPCLRMVAAIAVLTKDAGKLTMGQPLVILAPHAVEALVKQPPDRWLSNARMTHYQALLLDTDRVQFGPVVALNPATLLPLPEEGLQHNCLDILAEAHGTRPDLTDQPLPDADHTWYTDGSSLLQEGQRKAGAAVTTETEVIWAKALPAGTSAQRAELIALTQALKMAEGKKLNVYTDSRYAFATAHIHGEIYRRRGWLTSEGKEIKNKDEILALLKALFLPKRLSIIHCPGHQKGHSAEARGNRMADQAARKAAITETPDTSTLLIENSSPSGGSKRTADGSEFEAGKRTADGSEFEKRTADGSEFESPKKKAKVE

SEQ ID NO: 2915 - protein, 2116 aa, synthetic construct; identical to SEQ ID NO: 2668
  source 1..2116: note = Description of Artificial Sequence: Synthetic polypeptide

SEQ ID NO: 2916 - protein, 2113 aa, synthetic construct
  source 1..2113: note = Description of Artificial Sequence: Synthetic polypeptide
MPAAKRVKLDGGDKKYSIGLDIGTNSVGWAVITDEYKVPSKKFKVLGNTDRHSIKKNLIGALLFDSGETAEATRLKRTARRRYTRRKNRICYLQEIFSNEMAKVDDSFFHRLEESFLVEEDKKHERHPIFGNIVDEVAYHEKYPTIYHLRKKLVDSTDKADLRLIYLALAHMIKFRGHFLIEGDLNPDNSDVDKLFIQLVQTYNQLFEENPINASGVDAKAILSARLSKSRRLENLIAQLPGEKKNGLFGNLIALSLGLTPNFKSNFDLAEDAKLQLSKDTYDDDLDNLLAQIGDQYADLFLAAKNLSDAILLSDILRVNTEITKAPLSASMIKRYDEHHQDLTLLKALVRQQLPEKYKEIFFDQSKNGYAGYIDGGASQEEFYKFIKPILEKMDGTEELLVKLNREDLLRKQRTFDNGSIPHQIHLGELHAILRRQEDFYPFLKDNREKIEKILTFRIPYYVGPLARGNSRFAWMTRKSEETITPWNFEEVVDKGASAQSFIERMTNFDKNLPNEKVLPKHSLLYEYFTVYNELTKVKYVTEGMRKPAFLSGEQKKAIVDLLFKTNRKVTVKQLKEDYFKKIECFDSVEISGVEDRFNASLGTYHDLLKIIKDKDFLDNEENEDILEDIVLTLTLFEDREMIEERLKTYAHLFDDKVMKQLKRRRYTGWGRLSRKLINGIRDKQSGKTILDFLKSDGFANRNFMQLIHDDSLTFKEDIQKAQVSGQGDSLHEHIANLAGSPAIKKGILQTVKVVDELVKVMGRHKPENIVIEMARENQTTQKGQKNSRERMKRIEEGIKELGSQILKEHPVENTQLQNEKLYLYYLQNGRDMYVDQELDINRLSDYDVDHIVPQSFLKDDSIDNKVLTRSDKARGKSDNVPSEEVVKKMKNYWRQLLNAKLITQRKFDNLTKAERGGLSELDKAGFIKRQLVETRQITKHVAQILDSRMNTKYDENDKLIREVKVITLKSKLVSDFRKDFQFYKVREINNYHHAHDAYLNAVVGTALIKKYPKLESEFVYGDYKVYDVRKMIAKSEQEIGKATAKYFFYSNIMNFFKTEITLANGEIRKRPLIETNGETGEIVWDKGRDFATVRKVLSMPQVNIVKKTEVQTGGFSKESILPKRNSDKLIARKKDWDPKKYGGFDSPTVAYSVLVVAKVEKGKSKKLKSVKELLGITIMERSSFEKNPIDFLEAKGYKEVKKDLIIKLPKYSLFELENGRKRMLASAGELQKGNELALPSKYVNFLYLASHYEKLKGSPEDNEQKQLFVEQHKHYLDEIIEQISEFSKRVILADANLDKVLSAYNKHRDKPIREQAENIIHLFTLTNLGAPAAFKYFDTTIDRKRYTSTKEVLDATLIHQSITGLYETRIDLSQLGGDGGGSSEAAAKGGTLNIEDEYRLHETSKEPDVSLGSTWLSDFPQAWAETGGMGLAVRQAPLIIPLKATSTPVSIKQYPMSQEARLGIKPHIQRLLDQGILVPCQSPWNTPLLPVKKPGTNDYRPVQDLREVNKRVEDIHPTVPNPYNLLSGLPPSHQWYTVLDLKDAFFCLRLHPTSQPLFAFEWRDPEMGISGQLTWTRLPQGFKNSPTLFNEALHRDLADFRIQHPDLILLQYVDDLLLAATSELDCQQGTRALLQTLGNLGYRASAKKAQICQKQVKYLGYLLKEGQRWLTEARKETVMGQPTPKTPRQLREFLGKAGFCRLFIPGFAEMAAPLYPLTKPGTLFNWGPDQQKAYQEIKQALLTAPALGLPDLTKPFELFVDEKQGYAKGVLTQKLGPWRRPVAYLSKKLDPVAAGWPPCLRMVAAIAVLTKDAGKLTMGQPLVILAPHAVEALVKQPPDRWLSNARMTHYQALLLDTDRVQFGPVVALNPATLLPLPEEGLQHNCLDILAEAHGTRPDLTDQPLPDADHTWYTDGSSLLQEGQRKAGAAVTTETEVIWAKALPAGTSAQRAELIALTQALKMAEGKKLNVYTDSRYAFATAHIHGEIYRRRGWLTSEGKEIKNKDEILALLKALFLPKRLSIIHCPGHQKGHSAEARGNRMADQAARKAAITETPDTSTLLIENSSPSGGSKRTADGSEFEAGKRTADGSEFEKRTADGSEFESPKKKAKVE

SEQ ID NO: 2917 - protein, 2123 aa, synthetic construct
  source 1..2123: note = Description of Artificial Sequence: Synthetic polypeptide
MPAAKRVKLDGGDKKYSIGLDIGTNSVGWAVITDEYKVPSKKFKVLGNTDRHSIKKNLIGALLFDSGETAEATRLKRTARRRYTRRKNRICYLQEIFSNEMAKVDDSFFHRLEESFLVEEDKKHERHPIFGNIVDEVAYHEKYPTIYHLRKKLVDSTDKADLRLIYLALAHMIKFRGHFLIEGDLNPDNSDVDKLFIQLVQTYNQLFEENPINASGVDAKAILSARLSKSRRLENLIAQLPGEKKNGLFGNLIALSLGLTPNFKSNFDLAEDAKLQLSKDTYDDDLDNLLAQIGDQYADLFLAAKNLSDAILLSDILRVNTEITKAPLSASMIKRYDEHHQDLTLLKALVRQQLPEKYKEIFFDQSKNGYAGYIDGGASQEEFYKFIKPILEKMDGTEELLVKLNREDLLRKQRTFDNGSIPHQIHLGELHAILRRQEDFYPFLKDNREKIEKILTFRIPYYVGPLARGNSRFAWMTRKSEETITPWNFEEVVDKGASAQSFIERMTNFDKNLPNEKVLPKHSLLYEYFTVYNELTKVKYVTEGMRKPAFLSGEQKKAIVDLLFKTNRKVTVKQLKEDYFKKIECFDSVEISGVEDRFNASLGTYHDLLKIIKDKDFLDNEENEDILEDIVLTLTLFEDREMIEERLKTYAHLFDDKVMKQLKRRRYTGWGRLSRKLINGIRDKQSGKTILDFLKSDGFANRNFMQLIHDDSLTFKEDIQKAQVSGQGDSLHEHIANLAGSPAIKKGILQTVKVVDELVKVMGRHKPENIVIEMARENQTTQKGQKNSRERMKRIEEGIKELGSQILKEHPVENTQLQNEKLYLYYLQNGRDMYVDQELDINRLSDYDVDHIVPQSFLKDDSIDNKVLTRSDKARGKSDNVPSEEVVKKMKNYWRQLLNAKLITQRKFDNLTKAERGGLSELDKAGFIKRQLVETRQITKHVAQILDSRMNTKYDENDKLIREVKVITLKSKLVSDFRKDFQFYKVREINNYHHAHDAYLNAVVGTALIKKYPKLESEFVYGDYKVYDVRKMIAKSEQEIGKATAKYFFYSNIMNFFKTEITLANGEIRKRPLIETNGETGEIVWDKGRDFATVRKVLSMPQVNIVKKTEVQTGGFSKESILPKRNSDKLIARKKDWDPKKYGGFDSPTVAYSVLVVAKVEKGKSKKLKSVKELLGITIMERSSFEKNPIDFLEAKGYKEVKKDLIIKLPKYSLFELENGRKRMLASAGELQKGNELALPSKYVNFLYLASHYEKLKGSPEDNEQKQLFVEQHKHYLDEIIEQISEFSKRVILADANLDKVLSAYNKHRDKPIREQAENIIHLFTLTNLGAPAAFKYFDTTIDRKRYTSTKEVLDATLIHQSITGLYETRIDLSQLGGDGGGGSGGSGGSGGSGGSGGSGGTLNIEDEYRLHETSKEPDVSLGSTWLSDFPQAWAETGGMGLAVRQAPLIIPLKATSTPVSIKQYPMSQEARLGIKPHIQRLLDQGILVPCQSPWNTPLLPVKKPGTNDYRPVQDLREVNKRVEDIHPTVPNPYNLLSGLPPSHQWYTVLDLKDAFFCLRLHPTSQPLFAFEWRDPEMGISGQLTWTRLPQGFKNSPTLFNEALHRDLADFRIQHPDLILLQYVDDLLLAATSELDCQQGTRALLQTLGNLGYRASAKKAQICQKQVKYLGYLLKEGQRWLTEARKETVMGQPTPKTPRQLREFLGKAGFCRLFIPGFAEMAAPLYPLTKPGTLFNWGPDQQKAYQEIKQALLTAPALGLPDLTKPFELFVDEKQGYAKGVLTQKLGPWRRPVAYLSKKLDPVAAGWPPCLRMVAAIAVLTKDAGKLTMGQPLVILAPHAVEALVKQPPDRWLSNARMTHYQALLLDTDRVQFGPVVALNPATLLPLPEEGLQHNCLDILAEAHGTRPDLTDQPLPDADHTWYTDGSSLLQEGQRKAGAAVTTETEVIWAKALPAGTSAQRAELIALTQALKMAEGKKLNVYTDSRYAFATAHIHGEIYRRRGWLTSEGKEIKNKDEILALLKALFLPKRLSIIHCPGHQKGHSAEARGNRMADQAARKAAITETPDTSTLLIENSSPSGGSKRTADGSEFEAGKRTADGSEFEKRTADGSEFESPKKKAKVE

SEQ ID NO: 2918 - protein, 2114 aa, synthetic construct
  source 1..2114: note = Description of Artificial Sequence: Synthetic polypeptide
MPAAKRVKLDGGDKKYSIGLDIGTNSVGWAVITDEYKVPSKKFKVLGNTDRHSIKKNLIGALLFDSGETAEATRLKRTARRRYTRRKNRICYLQEIFSNEMAKVDDSFFHRLEESFLVEEDKKHERHPIFGNIVDEVAYHEKYPTIYHLRKKLVDSTDKADLRLIYLALAHMIKFRGHFLIEGDLNPDNSDVDKLFIQLVQTYNQLFEENPINASGVDAKAILSARLSKSRRLENLIAQLPGEKKNGLFGNLIALSLGLTPNFKSNFDLAEDAKLQLSKDTYDDDLDNLLAQIGDQYADLFLAAKNLSDAILLSDILRVNTEITKAPLSASMIKRYDEHHQDLTLLKALVRQQLPEKYKEIFFDQSKNGYAGYIDGGASQEEFYKFIKPILEKMDGTEELLVKLNREDLLRKQRTFDNGSIPHQIHLGELHAILRRQEDFYPFLKDNREKIEKILTFRIPYYVGPLARGNSRFAWMTRKSEETITPWNFEEVVDKGASAQSFIERMTNFDKNLPNEKVLPKHSLLYEYFTVYNELTKVKYVTEGMRKPAFLSGEQKKAIVDLLFKTNRKVTVKQLKEDYFKKIECFDSVEISGVEDRFNASLGTYHDLLKIIKDKDFLDNEENEDILEDIVLTLTLFEDREMIEERLKTYAHLFDDKVMKQLKRRRYTGWGRLSRKLINGIRDKQSGKTILDFLKSDGFANRNFMQLIHDDSLTFKEDIQKAQVSGQGDSLHEHIANLAGSPAIKKGILQTVKVVDELVKVMGRHKPENIVIEMARENQTTQKGQKNSRERMKRIEEGIKELGSQILKEHPVENTQLQNEKLYLYYLQNGRDMYVDQELDINRLSDYDVDHIVPQSFLKDDSIDNKVLTRSDKARGKSDNVPSEEVVKKMKNYWRQLLNAKLITQRKFDNLTKAERGGLSELDKAGFIKRQLVETRQITKHVAQILDSRMNTKYDENDKLIREVKVITLKSKLVSDFRKDFQFYKVREINNYHHAHDAYLNAVVGTALIKKYPKLESEFVYGDYKVYDVRKMIAKSEQEIGKATAKYFFYSNIMNFFKTEITLANGEIRKRPLIETNGETGEIVWDKGRDFATVRKVLSMPQVNIVKKTEVQTGGFSKESILPKRNSDKLIARKKDWDPKKYGGFDSPTVAYSVLVVAKVEKGKSKKLKSVKELLGITIMERSSFEKNPIDFLEAKGYKEVKKDLIIKLPKYSLFELENGRKRMLASAGELQKGNELALPSKYVNFLYLASHYEKLKGSPEDNEQKQLFVEQHKHYLDEIIEQISEFSKRVILADANLDKVLSAYNKHRDKPIREQAENIIHLFTLTNLGAPAAFKYFDTTIDRKRYTSTKEVLDATLIHQSITGLYETRIDLSQLGGDGGGGGGGSPAPGGTLNIEDEYRLHETSKEPDVSLGSTWLSDFPQAWAETGGMGLAVRQAPLIIPLKATSTPVSIKQYPMSQEARLGIKPHIQRLLDQGILVPCQSPWNTPLLPVKKPGTNDYRPVQDLREVNKRVEDIHPTVPNPYNLLSGLPPSHQWYTVLDLKDAFFCLRLHPTSQPLFAFEWRDPEMGISGQLTWTRLPQGFKNSPTLFNEALHRDLADFRIQHPDLILLQYVDDLLLAATSELDCQQGTRALLQTLGNLGYRASAKKAQICQKQVKYLGYLLKEGQRWLTEARKETVMGQPTPKTPRQLREFLGKAGFCRLFIPGFAEMAAPLYPLTKPGTLFNWGPDQQKAYQEIKQALLTAPALGLPDLTKPFELFVDEKQGYAKGVLTQKLGPWRRPVAYLSKKLDPVAAGWPPCLRMVAAIAVLTKDAGKLTMGQPLVILAPHAVEALVKQPPDRWLSNARMTHYQALLLDTDRVQFGPVVALNPATLLPLPEEGLQHNCLDILAEAHGTRPDLTDQPLPDADHTWYTDGSSLLQEGQRKAGAAVTTETEVIWAKALPAGTSAQRAELIALTQALKMAEGKKLNVYTDSRYAFATAHIHGEIYRRRGWLTSEGKEIKNKDEILALLKALFLPKRLSIIHCPGHQKGHSAEARGNRMADQAARKAAITETPDTSTLLIENSSPSGGSKRTADGSEFEAGKRTADGSEFEKRTADGSEFESPKKKAKVE

SEQ ID NO: 2919 - protein, 2116 aa, synthetic construct; identical to SEQ ID NO: 2690
  source 1..2116: note = Description of Artificial Sequence: Synthetic polypeptide

SEQ ID NO: 2920 - protein, 2116 aa, synthetic construct; identical to SEQ ID NO: 2648
  source 1..2116: note = Description of Artificial Sequence: Synthetic polypeptide

SEQ ID NO: 2921 - protein, 2114 aa, synthetic construct; identical to SEQ ID NO: 2616
  source 1..2114: note = Description of Artificial Sequence: Synthetic polypeptide

SEQ ID NO: 2922 - protein, 2116 aa, synthetic construct; identical to SEQ ID NO: 2666
  source 1..2116: note = Description of Artificial Sequence: Synthetic polypeptide

SEQ ID NO: 2923 - protein, 2111 aa, synthetic construct
  source 1..2111: note = Description of Artificial Sequence: Synthetic polypeptide
MPAAKRVKLDGGDKKYSIGLDIGTNSVGWAVITDEYKVPSKKFKVLGNTDRHSIKKNLIGALLFDSGETAEATRLKRTARRRYTRRKNRICYLQEIFSNEMAKVDDSFFHRLEESFLVEEDKKHERHPIFGNIVDEVAYHEKYPTIYHLRKKLVDSTDKADLRLIYLALAHMIKFRGHFLIEGDLNPDNSDVDKLFIQLVQTYNQLFEENPINASGVDAKAILSARLSKSRRLENLIAQLPGEKKNGLFGNLIALSLGLTPNFKSNFDLAEDAKLQLSKDTYDDDLDNLLAQIGDQYADLFLAAKNLSDAILLSDILRVNTEITKAPLSASMIKRYDEHHQDLTLLKALVRQQLPEKYKEIFFDQSKNGYAGYIDGGASQEEFYKFIKPILEKMDGTEELLVKLNREDLLRKQRTFDNGSIPHQIHLGELHAILRRQEDFYPFLKDNREKIEKILTFRIPYYVGPLARGNSRFAWMTRKSEETITPWNFEEVVDKGASAQSFIERMTNFDKNLPNEKVLPKHSLLYEYFTVYNELTKVKYVTEGMRKPAFLSGEQKKAIVDLLFKTNRKVTVKQLKEDYFKKIECFDSVEISGVEDRFNASLGTYHDLLKIIKDKDFLDNEENEDILEDIVLTLTLFEDREMIEERLKTYAHLFDDKVMKQLKRRRYTGWGRLSRKLINGIRDKQSGKTILDFLKSDGFANRNFMQLIHDDSLTFKEDIQKAQVSGQGDSLHEHIANLAGSPAIKKGILQTVKVVDELVKVMGRHKPENIVIEMARENQTTQKGQKNSRERMKRIEEGIKELGSQILKEHPVENTQLQNEKLYLYYLQNGRDMYVDQELDINRLSDYDVDHIVPQSFLKDDSIDNKVLTRSDKARGKSDNVPSEEVVKKMKNYWRQLLNAKLITQRKFDNLTKAERGGLSELDKAGFIKRQLVETRQITKHVAQILDSRMNTKYDENDKLIREVKVITLKSKLVSDFRKDFQFYKVREINNYHHAHDAYLNAVVGTALIKKYPKLESEFVYGDYKVYDVRKMIAKSEQEIGKATAKYFFYSNIMNFFKTEITLANGEIRKRPLIETNGETGEIVWDKGRDFATVRKVLSMPQVNIVKKTEVQTGGFSKESILPKRNSDKLIARKKDWDPKKYGGFDSPTVAYSVLVVAKVEKGKSKKLKSVKELLGITIMERSSFEKNPIDFLEAKGYKEVKKDLIIKLPKYSLFELENGRKRMLASAGELQKGNELALPSKYVNFLYLASHYEKLKGSPEDNEQKQLFVEQHKHYLDEIIEQISEFSKRVILADANLDKVLSAYNKHRDKPIREQAENIIHLFTLTNLGAPAAFKYFDTTIDRKRYTSTKEVLDATLIHQSITGLYETRIDLSQLGGDGGPAPGGGGGTLNIEDEYRLHETSKEPDVSLGSTWLSDFPQAWAETGGMGLAVRQAPLIIPLKATSTPVSIKQYPMSQEARLGIKPHIQRLLDQGILVPCQSPWNTPLLPVKKPGTNDYRPVQDLREVNKRVEDIHPTVPNPYNLLSGLPPSHQWYTVLDLKDAFFCLRLHPTSQPLFAFEWRDPEMGISGQLTWTRLPQGFKNSPTLFNEALHRDLADFRIQHPDLILLQYVDDLLLAATSELDCQQGTRALLQTLGNLGYRASAKKAQICQKQVKYLGYLLKEGQRWLTEARKETVMGQPTPKTPRQLREFLGKAGFCRLFIPGFAEMAAPLYPLTKPGTLFNWGPDQQKAYQEIKQALLTAPALGLPDLTKPFELFVDEKQGYAKGVLTQKLGPWRRPVAYLSKKLDPVAAGWPPCLRMVAAIAVLTKDAGKLTMGQPLVILAPHAVEALVKQPPDRWLSNARMTHYQALLLDTDRVQFGPVVALNPATLLPLPEEGLQHNCLDILAEAHGTRPDLTDQPLPDADHTWYTDGSSLLQEGQRKAGAAVTTETEVIWAKALPAGTSAQRAELIALTQALKMAEGKKLNVYTDSRYAFATAHIHGEIYRRRGWLTSEGKEIKNKDEILALLKALFLPKRLSIIHCPGHQKGHSAEARGNRMADQAARKAAITETPDTSTLLIENSSPSGGSKRTADGSEFEAGKRTADGSEFEKRTADGSEFESPKKKAKVE

SEQ ID NO: 2924 - protein, 2116 aa, synthetic construct
  source 1..2116: note = Description of Artificial Sequence: Synthetic polypeptide
MPAAKRVKLDGGDKKYSIGLDIGTNSVGWAVITDEYKVPSKKFKVLGNTDRHSIKKNLIGALLFDSGETAEATRLKRTARRRYTRRKNRICYLQEIFSNEMAKVDDSFFHRLEESFLVEEDKKHERHPIFGNIVDEVAYHEKYPTIYHLRKKLVDSTDKADLRLIYLALAHMIKFRGHFLIEGDLNPDNSDVDKLFIQLVQTYNQLFEENPINASGVDAKAILSARLSKSRRLENLIAQLPGEKKNGLFGNLIALSLGLTPNFKSNFDLAEDAKLQLSKDTYDDDLDNLLAQIGDQYADLFLAAKNLSDAILLSDILRVNTEITKAPLSASMIKRYDEHHQDLTLLKALVRQQLPEKYKEIFFDQSKNGYAGYIDGGASQEEFYKFIKPILEKMDGTEELLVKLNREDLLRKQRTFDNGSIPHQIHLGELHAILRRQEDFYPFLKDNREKIEKILTFRIPYYVGPLARGNSRFAWMTRKSEETITPWNFEEVVDKGASAQSFIERMTNFDKNLPNEKVLPKHSLLYEYFTVYNELTKVKYVTEGMRKPAFLSGEQKKAIVDLLFKTNRKVTVKQLKEDYFKKIECFDSVEISGVEDRFNASLGTYHDLLKIIKDKDFLDNEENEDILEDIVLTLTLFEDREMIEERLKTYAHLFDDKVMKQLKRRRYTGWGRLSRKLINGIRDKQSGKTILDFLKSDGFANRNFMQLIHDDSLTFKEDIQKAQVSGQGDSLHEHIANLAGSPAIKKGILQTVKVVDELVKVMGRHKPENIVIEMARENQTTQKGQKNSRERMKRIEEGIKELGSQILKEHPVENTQLQNEKLYLYYLQNGRDMYVDQELDINRLSDYDVDHIVPQSFLKDDSIDNKVLTRSDKARGKSDNVPSEEVVKKMKNYWRQLLNAKLITQRKFDNLTKAERGGLSELDKAGFIKRQLVETRQITKHVAQILDSRMNTKYDENDKLIREVKVITLKSKLVSDFRKDFQFYKVREINNYHHAHDAYLNAVVGTALIKKYPKLESEFVYGDYKVYDVRKMIAKSEQEIGKATAKYFFYSNIMNFFKTEITLANGEIRKRPLIETNGETGEIVWDKGRDFATVRKVLSMPQVNIVKKTEVQTGGFSKESILPKRNSDKLIARKKDWDPKKYGGFDSPTVAYSVLVVAKVEKGKSKKLKSVKELLGITIMERSSFEKNPIDFLEAKGYKEVKKDLIIKLPKYSLFELENGRKRMLASAGELQKGNELALPSKYVNFLYLASHYEKLKGSPEDNEQKQLFVEQHKHYLDEIIEQISEFSKRVILADANLDKVLSAYNKHRDKPIREQAENIIHLFTLTNLGAPAAFKYFDTTIDRKRYTSTKEVLDATLIHQSITGLYETRIDLSQLGGDGGPAPEAAAKGGSGGTLNIEDEYRLHETSKEPDVSLGSTWLSDFPQAWAETGGMGLAVRQAPLIIPLKATSTPVSIKQYPMSQEARLGIKPHIQRLLDQGILVPCQSPWNTPLLPVKKPGTNDYRPVQDLREVNKRVEDIHPTVPNPYNLLSGLPPSHQWYTVLDLKDAFFCLRLHPTSQPLFAFEWRDPEMGISGQLTWTRLPQGFKNSPTLFNEALHRDLADFRIQHPDLILLQYVDDLLLAATSELDCQQGTRALLQTLGNLGYRASAKKAQICQKQVKYLGYLLKEGQRWLTEARKETVMGQPTPKTPRQLREFLGKAGFCRLFIPGFAEMAAPLYPLTKPGTLFNWGPDQQKAYQEIKQALLTAPALGLPDLTKPFELFVDEKQGYAKGVLTQKLGPWRRPVAYLSKKLDPVAAGWPPCLRMVAAIAVLTKDAGKLTMGQPLVILAPHAVEALVKQPPDRWLSNARMTHYQALLLDTDRVQFGPVVALNPATLLPLPEEGLQHNCLDILAEAHGTRPDLTDQPLPDADHTWYTDGSSLLQEGQRKAGAAVTTETEVIWAKALPAGTSAQRAELIALTQALKMAEGKKLNVYTDSRYAFATAHIHGEIYRRRGWLTSEGKEIKNKDEILALLKALFLPKRLSIIHCPGHQKGHSAEARGNRMADQAARKAAITETPDTSTLLIENSSPSGGSKRTADGSEFEAGKRTADGSEFEKRTADGSEFESPKKKAKVE

SEQ ID NO: 2925 - protein, 2116 aa, synthetic construct; identical to SEQ ID NO: 2628
  source 1..2116: note = Description of Artificial Sequence: Synthetic polypeptide

SEQ ID NO: 2926 - protein, 2116 aa, synthetic construct; identical to SEQ ID NO: 2640
  source 1..2116: note = Description of Artificial Sequence: Synthetic polypeptide

SEQ ID NO: 2927 - protein, 2109 aa, synthetic construct
  source 1..2109: note = Description of Artificial Sequence: Synthetic polypeptide
MPAAKRVKLDGGDKKYSIGLDIGTNSVGWAVITDEYKVPSKKFKVLGNTDRHSIKKNLIGALLFDSGETAEATRLKRTARRRYTRRKNRICYLQEIFSNEMAKVDDSFFHRLEESFLVEEDKKHERHPIFGNIVDEVAYHEKYPTIYHLRKKLVDSTDKADLRLIYLALAHMIKFRGHFLIEGDLNPDNSDVDKLFIQLVQTYNQLFEENPINASGVDAKAILSARLSKSRRLENLIAQLPGEKKNGLFGNLIALSLGLTPNFKSNFDLAEDAKLQLSKDTYDDDLDNLLAQIGDQYADLFLAAKNLSDAILLSDILRVNTEITKAPLSASMIKRYDEHHQDLTLLKALVRQQLPEKYKEIFFDQSKNGYAGYIDGGASQEEFYKFIKPILEKMDGTEELLVKLNREDLLRKQRTFDNGSIPHQIHLGELHAILRRQEDFYPFLKDNREKIEKILTFRIPYYVGPLARGNSRFAWMTRKSEETITPWNFEEVVDKGASAQSFIERMTNFDKNLPNEKVLPKHSLLYEYFTVYNELTKVKYVTEGMRKPAFLSGEQKKAIVDLLFKTNRKVTVKQLKEDYFKKIECFDSVEISGVEDRFNASLGTYHDLLKIIKDKDFLDNEENEDILEDIVLTLTLFEDREMIEERLKTYAHLFDDKVMKQLKRRRYTGWGRLSRKLINGIRDKQSGKTILDFLKSDGFANRNFMQLIHDDSLTFKEDIQKAQVSGQGDSLHEHIANLAGSPAIKKGILQTVKVVDELVKVMGRHKPENIVIEMARENQTTQKGQKNSRERMKRIEEGIKELGSQILKEHPVENTQLQNEKLYLYYLQNGRDMYVDQELDINRLSDYDVDHIVPQSFLKDDSIDNKVLTRSDKARGKSDNVPSEEVVKKMKNYWRQLLNAKLITQRKFDNLTKAERGGLSELDKAGFIKRQLVETRQITKHVAQILDSRMNTKYDENDKLIREVKVITLKSKLVSDFRKDFQFYKVREINNYHHAHDAYLNAVVGTALIKKYPKLESEFVYGDYKVYDVRKMIAKSEQEIGKATAKYFFYSNIMNFFKTEITLANGEIRKRPLIETNGETGEIVWDKGRDFATVRKVLSMPQVNIVKKTEVQTGGFSKESILPKRNSDKLIARKKDWDPKKYGGFDSPTVAYSVLVVAKVEKGKSKKLKSVKELLGITIMERSSFEKNPIDFLEAKGYKEVKKDLIIKLPKYSLFELENGRKRMLASAGELQKGNELALPSKYVNFLYLASHYEKLKGSPEDNEQKQLFVEQHKHYLDEIIEQISEFSKRVILADANLDKVLSAYNKHRDKPIREQAENIIHLFTLTNLGAPAAFKYFDTTIDRKRYTSTKEVLDATLIHQSITGLYETRIDLSQLGGDGGGGGGGGTLNIEDEYRLHETSKEPDVSLGSTWLSDFPQAWAETGGMGLAVRQAPLIIPLKATSTPVSIKQYPMSQEARLGIKPHIQRLLDQGILVPCQSPWNTPLLPVKKPGTNDYRPVQDLREVNKRVEDIHPTVPNPYNLLSGLPPSHQWYTVLDLKDAFFCLRLHPTSQPLFAFEWRDPEMGISGQLTWTRLPQGFKNSPTLFNEALHRDLADFRIQHPDLILLQYVDDLLLAATSELDCQQGTRALLQTLGNLGYRASAKKAQICQKQVKYLGYLLKEGQRWLTEARKETVMGQPTPKTPRQLREFLGKAGFCRLFIPGFAEMAAPLYPLTKPGTLFNWGPDQQKAYQEIKQALLTAPALGLPDLTKPFELFVDEKQGYAKGVLTQKLGPWRRPVAYLSKKLDPVAAGWPPCLRMVAAIAVLTKDAGKLTMGQPLVILAPHAVEALVKQPPDRWLSNARMTHYQALLLDTDRVQFGPVVALNPATLLPLPEEGLQHNCLDILAEAHGTRPDLTDQPLPDADHTWYTDGSSLLQEGQRKAGAAVTTETEVIWAKALPAGTSAQRAELIALTQALKMAEGKKLNVYTDSRYAFATAHIHGEIYRRRGWLTSEGKEIKNKDEILALLKALFLPKRLSIIHCPGHQKGHSAEARGNRMADQAARKAAITETPDTSTLLIENSSPSGGSKRTADGSEFEAGKRTADGSEFEKRTADGSEFESPKKKAKVE

SEQ ID NO: 2928 - protein, 2116 aa, synthetic construct
  source 1..2116: note = Description of Artificial Sequence: Synthetic polypeptide
MPAAKRVKLDGGDKKYSIGLDIGTNSVGWAVITDEYKVPSKKFKVLGNTDRHSIKKNLIGALLFDSGETAEATRLKRTARRRYTRRKNRICYLQEIFSNEMAKVDDSFFHRLEESFLVEEDKKHERHPIFGNIVDEVAYHEKYPTIYHLRKKLVDSTDKADLRLIYLALAHMIKFRGHFLIEGDLNPDNSDVDKLFIQLVQTYNQLFEENPINASGVDAKAILSARLSKSRRLENLIAQLPGEKKNGLFGNLIALSLGLTPNFKSNFDLAEDAKLQLSKDTYDDDLDNLLAQIGDQYADLFLAAKNLSDAILLSDILRVNTEITKAPLSASMIKRYDEHHQDLTLLKALVRQQLPEKYKEIFFDQSKNGYAGYIDGGASQEEFYKFIKPILEKMDGTEELLVKLNREDLLRKQRTFDNGSIPHQIHLGELHAILRRQEDFYPFLKDNREKIEKILTFRIPYYVGPLARGNSRFAWMTRKSEETITPWNFEEVVDKGASAQSFIERMTNFDKNLPNEKVLPKHSLLYEYFTVYNELTKVKYVTEGMRKPAFLSGEQKKAIVDLLFKTNRKVTVKQLKEDYFKKIECFDSVEISGVEDRFNASLGTYHDLLKIIKDKDFLDNEENEDILEDIVLTLTLFEDREMIEERLKTYAHLFDDKVMKQLKRRRYTGWGRLSRKLINGIRDKQSGKTILDFLKSDGFANRNFMQLIHDDSLTFKEDIQKAQVSGQGDSLHEHIANLAGSPAIKKGILQTVKVVDELVKVMGRHKPENIVIEMARENQTTQKGQKNSRERMKRIEEGIKELGSQILKEHPVENTQLQNEKLYLYYLQNGRDMYVDQELDINRLSDYDVDHIVPQSFLKDDSIDNKVLTRSDKARGKSDNVPSEEVVKKMKNYWRQLLNAKLITQRKFDNLTKAERGGLSELDKAGFIKRQLVETRQITKHVAQILDSRMNTKYDENDKLIREVKVITLKSKLVSDFRKDFQFYKVREINNYHHAHDAYLNAVVGTALIKKYPKLESEFVYGDYKVYDVRKMIAKSEQEIGKATAKYFFYSNIMNFFKTEITLANGEIRKRPLIETNGETGEIVWDKGRDFATVRKVLSMPQVNIVKKTEVQTGGFSKESILPKRNSDKLIARKKDWDPKKYGGFDSPTVAYSVLVVAKVEKGKSKKLKSVKELLGITIMERSSFEKNPIDFLEAKGYKEVKKDLIIKLPKYSLFELENGRKRMLASAGELQKGNELALPSKYVNFLYLASHYEKLKGSPEDNEQKQLFVEQHKHYLDEIIEQISEFSKRVILADANLDKVLSAYNKHRDKPIREQAENIIHLFTLTNLGAPAAFKYFDTTIDRKRYTSTKEVLDATLIHQSITGLYETRIDLSQLGGDGGGGGGGSEAAAKGGTLNIEDEYRLHETSKEPDVSLGSTWLSDFPQAWAETGGMGLAVRQAPLIIPLKATSTPVSIKQYPMSQEARLGIKPHIQRLLDQGILVPCQSPWNTPLLPVKKPGTNDYRPVQDLREVNKRVEDIHPTVPNPYNLLSGLPPSHQWYTVLDLKDAFFCLRLHPTSQPLFAFEWRDPEMGISGQLTWTRLPQGFKNSPTLFNEALHRDLADFRIQHPDLILLQYVDDLLLAATSELDCQQGTRALLQTLGNLGYRASAKKAQICQKQVKYLGYLLKEGQRWLTEARKETVMGQPTPKTPRQLREFLGKAGFCRLFIPGFAEMAAPLYPLTKPGTLFNWGPDQQKAYQEIKQALLTAPALGLPDLTKPFELFVDEKQGYAKGVLTQKLGPWRRPVAYLSKKLDPVAAGWPPCLRMVAAIAVLTKDAGKLTMGQPLVILAPHAVEALVKQPPDRWLSNARMTHYQALLLDTDRVQFGPVVALNPATLLPLPEEGLQHNCLDILAEAHGTRPDLTDQPLPDADHTWYTDGSSLLQEGQRKAGAAVTTETEVIWAKALPAGTSAQRAELIALTQALKMAEGKKLNVYTDSRYAFATAHIHGEIYRRRGWLTSEGKEIKNKDEILALLKALFLPKRLSIIHCPGHQKGHSAEARGNRMADQAARKAAITETPDTSTLLIENSSPSGGSKRTADGSEFEAGKRTADGSEFEKRTADGSEFESPKKKAKVE

SEQ ID NO: 2929 - protein, 2113 aa, synthetic construct; identical to SEQ ID NO: 2700
  source 1..2113: note = Description of Artificial Sequence: Synthetic polypeptide

SEQ ID NO: 2930 - protein, 2114 aa, synthetic construct; identical to SEQ ID NO: 2656
  source 1..2114: note = Description of Artificial Sequence: Synthetic polypeptide

SEQ ID NO: 2931 - protein, 2116 aa, synthetic construct; identical to SEQ ID NO: 2652
  source 1..2116: note = Description of Artificial Sequence: Synthetic polypeptide

SEQ ID NO: 2932 - protein, 2120 aa, synthetic construct; identical to SEQ ID NO: 2623
  source 1..2120: note = Description of Artificial Sequence: Synthetic polypeptide

SEQ ID NO: 2933 - protein, 2113 aa, synthetic construct; identical to SEQ ID NO: 2657
  source 1..2113: note = Description of Artificial Sequence: Synthetic polypeptide

SEQ ID NO: 2934 - protein, 2111 aa, synthetic construct; identical to SEQ ID NO: 2693
  source 1..2111: note = Description of Artificial Sequence: Synthetic polypeptide

SEQ ID NO: 2935 - protein, 2108 aa, synthetic construct; identical to SEQ ID NO: 2646
  source 1..2108: note = Description of Artificial Sequence: Synthetic polypeptide

SEQ ID NO: 2936 - protein, 2111 aa, synthetic construct
  source 1..2111: note = Description of Artificial Sequence: Synthetic polypeptide
MPAAKRVKLDGGDKKYSIGLDIGTNSVGWAVITDEYKVPSKKFKVLGNTDRHSIKKNLIGALLFDSGETAEATRLKRTARRRYTRRKNRICYLQEIFSNEMAKVDDSFFHRLEESFLVEEDKKHERHPIFGNIVDEVAYHEKYPTIYHLRKKLVDSTDKADLRLIYLALAHMIKFRGHFLIEGDLNPDNSDVDKLFIQLVQTYNQLFEENPINASGVDAKAILSARLSKSRRLENLIAQLPGEKKNGLFGNLIALSLGLTPNFKSNFDLAEDAKLQLSKDTYDDDLDNLLAQIGDQYADLFLAAKNLSDAILLSDILRVNTEITKAPLSASMIKRYDEHHQDLTLLKALVRQQLPEKYKEIFFDQSKNGYAGYIDGGASQEEFYKFIKPILEKMDGTEELLVKLNREDLLRKQRTFDNGSIPHQIHLGELHAILRRQEDFYPFLKDNREKIEKILTFRIPYYVGPLARGNSRFAWMTRKSEETITPWNFEEVVDKGASAQSFIERMTNFDKNLPNEKVLPKHSLLYEYFTVYNELTKVKYVTEGMRKPAFLSGEQKKAIVDLLFKTNRKVTVKQLKEDYFKKIECFDSVEISGVEDRFNASLGTYHDLLKIIKDKDFLDNEENEDILEDIVLTLTLFEDREMIEERLKTYAHLFDDKVMKQLKRRRYTGWGRLSRKLINGIRDKQSGKTILDFLKSDGFANRNFMQLIHDDSLTFKEDIQKAQVSGQGDSLHEHIANLAGSPAIKKGILQTVKVVDELVKVMGRHKPENIVIEMARENQTTQKGQKNSRERMKRIEEGIKELGSQILKEHPVENTQLQNEKLYLYYLQNGRDMYVDQELDINRLSDYDVDHIVPQSFLKDDSIDNKVLTRSDKARGKSDNVPSEEVVKKMKNYWRQLLNAKLITQRKFDNLTKAERGGLSELDKAGFIKRQLVETRQITKHVAQILDSRMNTKYDENDKLIREVKVITLKSKLVSDFRKDFQFYKVREINNYHHAHDAYLNAVVGTALIKKYPKLESEFVYGDYKVYDVRKMIAKSEQEIGKATAKYFFYSNIMNFFKTEITLANGEIRKRPLIETNGETGEIVWDKGRDFATVRKVLSMPQVNIVKKTEVQTGGFSKESILPKRNSDKLIARKKDWDPKKYGGFDSPTVAYSVLVVAKVEKGKSKKLKSVKELLGITIMERSSFEKNPIDFLEAKGYKEVKKDLIIKLPKYSLFELENGRKRMLASAGELQKGNELALPSKYVNFLYLASHYEKLKGSPEDNEQKQLFVEQHKHYLDEIIEQISEFSKRVILADANLDKVLSAYNKHRDKPIREQAENIIHLFTLTNLGAPAAFKYFDTTIDRKRYTSTKEVLDATLIHQSITGLYETRIDLSQLGGDGGPAPGSSGGTLNIEDEYRLHETSKEPDVSLGSTWLSDFPQAWAETGGMGLAVRQAPLIIPLKATSTPVSIKQYPMSQEARLGIKPHIQRLLDQGILVPCQSPWNTPLLPVKKPGTNDYRPVQDLREVNKRVEDIHPTVPNPYNLLSGLPPSHQWYTVLDLKDAFFCLRLHPTSQPLFAFEWRDPEMGISGQLTWTRLPQGFKNSPTLFNEALHRDLADFRIQHPDLILLQYVDDLLLAATSELDCQQGTRALLQTLGNLGYRASAKKAQICQKQVKYLGYLLKEGQRWLTEARKETVMGQPTPKTPRQLREFLGKAGFCRLFIPGFAEMAAPLYPLTKPGTLFNWGPDQQKAYQEIKQALLTAPALGLPDLTKPFELFVDEKQGYAKGVLTQKLGPWRRPVAYLSKKLDPVAAGWPPCLRMVAAIAVLTKDAGKLTMGQPLVILAPHAVEALVKQPPDRWLSNARMTHYQALLLDTDRVQFGPVVALNPATLLPLPEEGLQHNCLDILAEAHGTRPDLTDQPLPDADHTWYTDGSSLLQEGQRKAGAAVTTETEVIWAKALPAGTSAQRAELIALTQALKMAEGKKLNVYTDSRYAFATAHIHGEIYRRRGWLTSEGKEIKNKDEILALLKALFLPKRLSIIHCPGHQKGHSAEARGNRMADQAARKAAITETPDTSTLLIENSSPSGGSKRTADGSEFEAGKRTADGSEFEKRTADGSEFESPKKKAKVE

SEQ ID NO: 2937 - protein, 2120 aa, synthetic construct; identical to SEQ ID NO: 2636
  source 1..2120: note = Description of Artificial Sequence: Synthetic polypeptide

SEQ ID NO: 2938 - protein, 2116 aa, synthetic construct; identical to SEQ ID NO: 2661
  source 1..2116: note = Description of Artificial Sequence: Synthetic polypeptide

SEQ ID NO: 2939 - protein, 2120 aa, synthetic construct; identical to SEQ ID NO: 2680
  source 1..2120: note = Description of Artificial Sequence: Synthetic polypeptide

SEQ ID NO: 2940 - protein, 2116 aa, synthetic construct
  source 1..2116: note = Description of Artificial Sequence: Synthetic polypeptide
MPAAKRVKLDGGDKKYSIGLDIGTNSVGWAVITDEYKVPSKKFKVLGNTDRHSIKKNLIGALLFDSGETAEATRLKRTARRRYTRRKNRICYLQEIFSNEMAKVDDSFFHRLEESFLVEEDKKHERHPIFGNIVDEVAYHEKYPTIYHLRKKLVDSTDKADLRLIYLALAHMIKFRGHFLIEGDLNPDNSDVDKLFIQLVQTYNQLFEENPINASGVDAKAILSARLSKSRRLENLIAQLPGEKKNGLFGNLIALSLGLTPNFKSNFDLAEDAKLQLSKDTYDDDLDNLLAQIGDQYADLFLAAKNLSDAILLSDILRVNTEITKAPLSASMIKRYDEHHQDLTLLKALVRQQLPEKYKEIFFDQSKNGYAGYIDGGASQEEFYKFIKPILEKMDGTEELLVKLNREDLLRKQRTFDNGSIPHQIHLGELHAILRRQEDFYPFLKDNREKIEKILTFRIPYYVGPLARGNSRFAWMTRKSEETITPWNFEEVVDKGASAQSFIERMTNFDKNLPNEKVLPKHSLLYEYFTVYNELTKVKYVTEGMRKPAFLSGEQKKAIVDLLFKTNRKVTVKQLKEDYFKKIECFDSVEISGVEDRFNASLGTYHDLLKIIKDKDFLDNEENEDILEDIVLTLTLFEDREMIEERLKTYAHLFDDKVMKQLKRRRYTGWGRLSRKLINGIRDKQSGKTILDFLKSDGFANRNFMQLIHDDSLTFKEDIQKAQVSGQGDSLHEHIANLAGSPAIKKGILQTVKVVDELVKVMGRHKPENIVIEMARENQTTQKGQKNSRERMKRIEEGIKELGSQILKEHPVENTQLQNEKLYLYYLQNGRDMYVDQELDINRLSDYDVDHIVPQSFLKDDSIDNKVLTRSDKARGKSDNVPSEEVVKKMKNYWRQLLNAKLITQRKFDNLTKAERGGLSELDKAGFIKRQLVETRQITKHVAQILDSRMNTKYDENDKLIREVKVITLKSKLVSDFRKDFQFYKVREINNYHHAHDAYLNAVVGTALIKKYPKLESEFVYGDYKVYDVRKMIAKSEQEIGKATAKYFFYSNIMNFFKTEITLANGEIRKRPLIETNGETGEIVWDKGRDFATVRKVLSMPQVNIVKKTEVQTGGFSKESILPKRNSDKLIARKKDWDPKKYGGFDSPTVAYSVLVVAKVEKGKSKKLKSVKELLGITIMERSSFEKNPIDFLEAKGYKEVKKDLIIKLPKYSLFELENGRKRMLASAGELQKGNELALPSKYVNFLYLASHYEKLKGSPEDNEQKQLFVEQHKHYLDEIIEQISEFSKRVILADANLDKVLSAYNKHRDKPIREQAENIIHLFTLTNLGAPAAFKYFDTTIDRKRYTSTKEVLDATLIHQSITGLYETRIDLSQLGGDGGGGGPAPEAAAKGGTLNIEDEYRLHETSKEPDVSLGSTWLSDFPQAWAETGGMGLAVRQAPLIIPLKATSTPVSIKQYPMSQEARLGIKPHIQRLLDQGILVPCQSPWNTPLLPVKKPGTNDYRPVQDLREVNKRVEDIHPTVPNPYNLLSGLPPSHQWYTVLDLKDAFFCLRLHPTSQPLFAFEWRDPEMGISGQLTWTRLPQGFKNSPTLFNEALHRDLADFRIQHPDLILLQYVDDLLLAATSELDCQQGTRALLQTLGNLGYRASAKKAQICQKQVKYLGYLLKEGQRWLTEARKETVMGQPTPKTPRQLREFLGKAGFCRLFIPGFAEMAAPLYPLTKPGTLFNWGPDQQKAYQEIKQALLTAPALGLPDLTKPFELFVDEKQGYAKGVLTQKLGPWRRPVAYLSKKLDPVAAGWPPCLRMVAAIAVLTKDAGKLTMGQPLVILAPHAVEALVKQPPDRWLSNARMTHYQALLLDTDRVQFGPVVALNPATLLPLPEEGLQHNCLDILAEAHGTRPDLTDQPLPDADHTWYTDGSSLLQEGQRKAGAAVTTETEVIWAKALPAGTSAQRAELIALTQALKMAEGKKLNVYTDSRYAFATAHIHGEIYRRRGWLTSEGKEIKNKDEILALLKALFLPKRLSIIHCPGHQKGHSAEARGNRMADQAARKAAITETPDTSTLLIENSSPSGGSKRTADGSEFEAGKRTADGSEFEKRTADGSEFESPKKKAKVE

SEQ ID NO: 2941 - protein, 2120 aa, synthetic construct; identical to SEQ ID NO: 2669
  source 1..2120: note = Description of Artificial Sequence: Synthetic polypeptide

SEQ ID NO: 2942 - protein, 2116 aa, synthetic construct; identical to SEQ ID NO: 2695
  source 1..2116: note = Description of Artificial Sequence: Synthetic polypeptide

SEQ ID NO: 2943 - protein, 2123 aa, synthetic construct; identical to SEQ ID NO: 2612
  source 1..2123: note = Description of Artificial Sequence: Synthetic polypeptide

SEQ ID NO: 2944 - protein, 2110 aa, synthetic construct; identical to SEQ ID NO: 2691
  source 1..2110: note = Description of Artificial Sequence: Synthetic polypeptide

SEQ ID NO: 2945 - protein, 2113 aa, synthetic construct; identical to SEQ ID NO: 2659
  source 1..2113: note = Description of Artificial Sequence: Synthetic polypeptide

SEQ ID NO: 2946 - protein, 2114 aa, synthetic construct; identical to SEQ ID NO: 2694
  source 1..2114: note = Description of Artificial Sequence: Synthetic polypeptide

SEQ ID NO: 2947 - protein, 2111 aa, synthetic construct; identical to SEQ ID NO: 2682
  source 1..2111: note = Description of Artificial Sequence: Synthetic polypeptide

SEQ ID NO: 2948 - protein, 2114 aa, synthetic construct; identical to SEQ ID NO: 2675
  source 1..2114: note = Description of Artificial Sequence: Synthetic polypeptide

SEQ ID NO: 2949 - protein, 2116 aa, synthetic construct; identical to SEQ ID NO: 2686
  source 1..2116: note = Description of Artificial Sequence: Synthetic polypeptide

SEQ ID NO: 2950 - protein, 2114 aa, synthetic construct; identical to SEQ ID NO: 2632
  source 1..2114: note = Description of Artificial Sequence: Synthetic polypeptide

SEQ ID NO: 2951 - protein, 2113 aa, synthetic construct; identical to SEQ ID NO: 2625
  source 1..2113: note = Description of Artificial Sequence: Synthetic polypeptide

SEQ ID NO: 2952 - protein, 2114 aa, synthetic construct; identical to SEQ ID NO: 2699
  source 1..2114: note = Description of Artificial Sequence: Synthetic polypeptide

SEQ ID NO: 2953 - protein, 2113 aa, synthetic construct
  source 1..2113: note = Description of Artificial Sequence: Synthetic polypeptide
MPAAKRVKLDGGDKKYSIGLDIGTNSVGWAVITDEYKVPSKKFKVLGNTDRHSIKKNLIGALLFDSGETAEATRLKRTARRRYTRRKNRICYLQEIFSNEMAKVDDSFFHRLEESFLVEEDKKHERHPIFGNIVDEVAYHEKYPTIYHLRKKLVDSTDKADLRLIYLALAHMIKFRGHFLIEGDLNPDNSDVDKLFIQLVQTYNQLFEENPINASGVDAKAILSARLSKSRRLENLIAQLPGEKKNGLFGNLIALSLGLTPNFKSNFDLAEDAKLQLSKDTYDDDLDNLLAQIGDQYADLFLAAKNLSDAILLSDILRVNTEITKAPLSASMIKRYDEHHQDLTLLKALVRQQLPEKYKEIFFDQSKNGYAGYIDGGASQEEFYKFIKPILEKMDGTEELLVKLNREDLLRKQRTFDNGSIPHQIHLGELHAILRRQEDFYPFLKDNREKIEKILTFRIPYYVGPLARGNSRFAWMTRKSEETITPWNFEEVVDKGASAQSFIERMTNFDKNLPNEKVLPKHSLLYEYFTVYNELTKVKYVTEGMRKPAFLSGEQKKAIVDLLFKTNRKVTVKQLKEDYFKKIECFDSVEISGVEDRFNASLGTYHDLLKIIKDKDFLDNEENEDILEDIVLTLTLFEDREMIEERLKTYAHLFDDKVMKQLKRRRYTGWGRLSRKLINGIRDKQSGKTILDFLKSDGFANRNFMQLIHDDSLTFKEDIQKAQVSGQGDSLHEHIANLAGSPAIKKGILQTVKVVDELVKVMGRHKPENIVIEMARENQTTQKGQKNSRERMKRIEEGIKELGSQILKEHPVENTQLQNEKLYLYYLQNGRDMYVDQELDINRLSDYDVDHIVPQSFLKDDSIDNKVLTRSDKARGKSDNVPSEEVVKKMKNYWRQLLNAKLITQRKFDNLTKAERGGLSELDKAGFIKRQLVETRQITKHVAQILDSRMNTKYDENDKLIREVKVITLKSKLVSDFRKDFQFYKVREINNYHHAHDAYLNAVVGTALIKKYPKLESEFVYGDYKVYDVRKMIAKSEQEIGKATAKYFFYSNIMNFFKTEITLANGEIRKRPLIETNGETGEIVWDKGRDFATVRKVLSMPQVNIVKKTEVQTGGFSKESILPKRNSDKLIARKKDWDPKKYGGFDSPTVAYSVLVVAKVEKGKSKKLKSVKELLGITIMERSSFEKNPIDFLEAKGYKEVKKDLIIKLPKYSLFELENGRKRMLASAGELQKGNELALPSKYVNFLYLASHYEKLKGSPEDNEQKQLFVEQHKHYLDEIIEQISEFSKRVILADANLDKVLSAYNKHRDKPIREQAENIIHLFTLTNLGAPAAFKYFDTTIDRKRYTSTKEVLDATLIHQSITGLYETRIDLSQLGGDGGGGGEAAAKGGTLNIEDEYRLHETSKEPDVSLGSTWLSDFPQAWAETGGMGLAVRQAPLIIPLKATSTPVSIKQYPMSQEARLGIKPHIQRLLDQGILVPCQSPWNTPLLPVKKPGTNDYRPVQDLREVNKRVEDIHPTVPNPYNLLSGLPPSHQWYTVLDLKDAFFCLRLHPTSQPLFAFEWRDPEMGISGQLTWTRLPQGFKNSPTLFNEALHRDLADFRIQHPDLILLQYVDDLLLAATSELDCQQGTRALLQTLGNLGYRASAKKAQICQKQVKYLGYLLKEGQRWLTEARKETVMGQPTPKTPRQLREFLGKAGFCRLFIPGFAEMAAPLYPLTKPGTLFNWGPDQQKAYQEIKQALLTAPALGLPDLTKPFELFVDEKQGYAKGVLTQKLGPWRRPVAYLSKKLDPVAAGWPPCLRMVAAIAVLTKDAGKLTMGQPLVILAPHAVEALVKQPPDRWLSNARMTHYQALLLDTDRVQFGPVVALNPATLLPLPEEGLQHNCLDILAEAHGTRPDLTDQPLPDADHTWYTDGSSLLQEGQRKAGAAVTTETEVIWAKALPAGTSAQRAELIALTQALKMAEGKKLNVYTDSRYAFATAHIHGEIYRRRGWLTSEGKEIKNKDEILALLKALFLPKRLSIIHCPGHQKGHSAEARGNRMADQAARKAAITETPDTSTLLIENSSPSGGSKRTADGSEFEAGKRTADGSEFEKRTADGSEFESPKKKAKVE

SEQ ID NO: 2954 - protein, 2114 aa, synthetic construct
  source 1..2114: note = Description of Artificial Sequence: Synthetic polypeptide
MPAAKRVKLDGGDKKYSIGLDIGTNSVGWAVITDEYKVPSKKFKVLGNTDRHSIKKNLIGALLFDSGETAEATRLKRTARRRYTRRKNRICYLQEIFSNEMAKVDDSFFHRLEESFLVEEDKKHERHPIFGNIVDEVAYHEKYPTIYHLRKKLVDSTDKADLRLIYLALAHMIKFRGHFLIEGDLNPDNSDVDKLFIQLVQTYNQLFEENPINASGVDAKAILSARLSKSRRLENLIAQLPGEKKNGLFGNLIALSLGLTPNFKSNFDLAEDAKLQLSKDTYDDDLDNLLAQIGDQYADLFLAAKNLSDAILLSDILRVNTEITKAPLSASMIKRYDEHHQDLTLLKALVRQQLPEKYKEIFFDQSKNGYAGYIDGGASQEEFYKFIKPILEKMDGTEELLVKLNREDLLRKQRTFDNGSIPHQIHLGELHAILRRQEDFYPFLKDNREKIEKILTFRIPYYVGPLARGNSRFAWMTRKSEETITPWNFEEVVDKGASAQSFIERMTNFDKNLPNEKVLPKHSLLYEYFTVYNELTKVKYVTEGMRKPAFLSGEQKKAIVDLLFKTNRKVTVKQLKEDYFKKIECFDSVEISGVEDRFNASLGTYHDLLKIIKDKDFLDNEENEDILEDIVLTLTLFEDREMIEERLKTYAHLFDDKVMKQLKRRRYTGWGRLSRKLINGIRDKQSGKTILDFLKSDGFANRNFMQLIHDDSLTFKEDIQKAQVSGQGDSLHEHIANLAGSPAIKKGILQTVKVVDELVKVMGRHKPENIVIEMARENQTTQKGQKNSRERMKRIEEGIKELGSQILKEHPVENTQLQNEKLYLYYLQNGRDMYVDQELDINRLSDYDVDHIVPQSFLKDDSIDNKVLTRSDKARGKSDNVPSEEVVKKMKNYWRQLLNAKLITQRKFDNLTKAERGGLSELDKAGFIKRQLVETRQITKHVAQILDSRMNTKYDENDKLIREVKVITLKSKLVSDFRKDFQFYKVREINNYHHAHDAYLNAVVGTALIKKYPKLESEFVYGDYKVYDVRKMIAKSEQEIGKATAKYFFYSNIMNFFKTEITLANGEIRKRPLIETNGETGEIVWDKGRDFATVRKVLSMPQVNIVKKTEVQTGGFSKESILPKRNSDKLIARKKDWDPKKYGGFDSPTVAYSVLVVAKVEKGKSKKLKSVKELLGITIMERSSFEKNPIDFLEAKGYKEVKKDLIIKLPKYSLFELENGRKRMLASAGELQKGNELALPSKYVNFLYLASHYEKLKGSPEDNEQKQLFVEQHKHYLDEIIEQISEFSKRVILADANLDKVLSAYNKHRDKPIREQAENIIHLFTLTNLGAPAAFKYFDTTIDRKRYTSTKEVLDATLIHQSITGLYETRIDLSQLGGDGGGSSGGGPAPGGTLNIEDEYRLHETSKEPDVSLGSTWLSDFPQAWAETGGMGLAVRQAPLIIPLKATSTPVSIKQYPMSQEARLGIKPHIQRLLDQGILVPCQSPWNTPLLPVKKPGTNDYRPVQDLREVNKRVEDIHPTVPNPYNLLSGLPPSHQWYTVLDLKDAFFCLRLHPTSQPLFAFEWRDPEMGISGQLTWTRLPQGFKNSPTLFNEALHRDLADFRIQHPDLILLQYVDDLLLAATSELDCQQGTRALLQTLGNLGYRASAKKAQICQKQVKYLGYLLKEGQRWLTEARKETVMGQPTPKTPRQLREFLGKAGFCRLFIPGFAEMAAPLYPLTKPGTLFNWGPDQQKAYQEIKQALLTAPALGLPDLTKPFELFVDEKQGYAKGVLTQKLGPWRRPVAYLSKKLDPVAAGWPPCLRMVAAIAVLTKDAGKLTMGQPLVILAPHAVEALVKQPPDRWLSNARMTHYQALLLDTDRVQFGPVVALNPATLLPLPEEGLQHNCLDILAEAHGTRPDLTDQPLPDADHTWYTDGSSLLQEGQRKAGAAVTTETEVIWAKALPAGTSAQRAELIALTQALKMAEGKKLNVYTDSRYAFATAHIHGEIYRRRGWLTSEGKEIKNKDEILALLKALFLPKRLSIIHCPGHQKGHSAEARGNRMADQAARKAAITETPDTSTLLIENSSPSGGSKRTADGSEFEAGKRTADGSEFEKRTADGSEFESPKKKAKVE

SEQ ID NO: 2955 - protein, 2114 aa, synthetic construct; identical to SEQ ID NO: 2689
  source 1..2114: note = Description of Artificial Sequence: Synthetic polypeptide

SEQ ID NO: 2956 - protein, 1999 aa, synthetic construct
  source 1..1999: note = Description of Artificial Sequence: Synthetic polypeptide
MPAAKRVKLDGGDKKYSIGLDIGTNSVGWAVITDEYKVPSKKFKVLGNTDRHSIKKNLIGALLFDSGETAEATRLKRTARRRYTRRKNRICYLQEIFSNEMAKVDDSFFHRLEESFLVEEDKKHERHPIFGNIVDEVAYHEKYPTIYHLRKKLVDSTDKADLRLIYLALAHMIKFRGHFLIEGDLNPDNSDVDKLFIQLVQTYNQLFEENPINASGVDAKAILSARLSKSRRLENLIAQLPGEKKNGLFGNLIALSLGLTPNFKSNFDLAEDAKLQLSKDTYDDDLDNLLAQIGDQYADLFLAAKNLSDAILLSDILRVNTEITKAPLSASMIKRYDEHHQDLTLLKALVRQQLPEKYKEIFFDQSKNGYAGYIDGGASQEEFYKFIKPILEKMDGTEELLVKLNREDLLRKQRTFDNGSIPHQIHLGELHAILRRQEDFYPFLKDNREKIEKILTFRIPYYVGPLARGNSRFAWMTRKSEETITPWNFEEVVDKGASAQSFIERMTNFDKNLPNEKVLPKHSLLYEYFTVYNELTKVKYVTEGMRKPAFLSGEQKKAIVDLLFKTNRKVTVKQLKEDYFKKIECFDSVEISGVEDRFNASLGTYHDLLKIIKDKDFLDNEENEDILEDIVLTLTLFEDREMIEERLKTYAHLFDDKVMKQLKRRRYTGWGRLSRKLINGIRDKQSGKTILDFLKSDGFANRNFMQLIHDDSLTFKEDIQKAQVSGQGDSLHEHIANLAGSPAIKKGILQTVKVVDELVKVMGRHKPENIVIEMARENQTTQKGQKNSRERMKRIEEGIKELGSQILKEHPVENTQLQNEKLYLYYLQNGRDMYVDQELDINRLSDYDVDHIVPQSFLKDDSIDNKVLTRSDKARGKSDNVPSEEVVKKMKNYWRQLLNAKLITQRKFDNLTKAERGGLSELDKAGFIKRQLVETRQITKHVAQILDSRMNTKYDENDKLIREVKVITLKSKLVSDFRKDFQFYKVREINNYHHAHDAYLNAVVGTALIKKYPKLESEFVYGDYKVYDVRKMIAKSEQEIGKATAKYFFYSNIMNFFKTEITLANGEIRKRPLIETNGETGEIVWDKGRDFATVRKVLSMPQVNIVKKTEVQTGGFSKESILPKRNSDKLIARKKDWDPKKYGGFDSPTVAYSVLVVAKVEKGKSKKLKSVKELLGITIMERSSFEKNPIDFLEAKGYKEVKKDLIIKLPKYSLFELENGRKRMLASAGELQKGNELALPSKYVNFLYLASHYEKLKGSPEDNEQKQLFVEQHKHYLDEIIEQISEFSKRVILADANLDKVLSAYNKHRDKPIREQAENIIHLFTLTNLGAPAAFKYFDTTIDRKRYTSTKEVLDATLIHQSITGLYETRIDLSQLGGDGGGGGGSSGGSGGGVLDAPPSHIGLEHLPPPPEVPQFPLNLERLQALQDLVHRSLEAGYISPWDGPGNNPVFPVRKPNGAWRFVHDLRVTNALTKPIPALSPGPPDLTAIPTHLPHIICLDLKDAFFQIPVEDRFRSYFAFTLPTPGGLQPHRRFAWRVLPQGFINSPALFQRALQEPLRQVSAAFSQSLLVSYMDDILYVSPTEEQRLQCYQTMAAHLRDLGFQVASEKTRQTPSPVPFLGQMVHERMVTYQSLPTLQISSPISLHQLQTVLGDLQWVSRGTPTTRRPLQLLYSSLKPIDDPRAIIHLSPEQQQGIAELRQALSHNARSRYNEQEPLLAYVHLTRAGSTLVLFQKGAQFPLAYFQTPLTDNQASPWGLLLLLGCQYLQAQALSSYAKTILKYYHNLPKTSLDNWIQSSEDPRVQELLQLWPQISSQGIQPPGPWKTLVTRAEVFLTPQFSPEPIPAALCLFSDGAARRGAYCLWKDHLLDFQAVPAPESAQKGELAGLLAGLAAAPPEPLNIWVDSKYLYSLLRTLVLGAWLQPDPVPSYALLYKSLLRHPAIFVGHVRSHSSASHPIASLNNYVDQLAGKRTADGSEFEKRTADGSEFESPKKKAKVE

SEQ ID NO: 2957 - protein, 2131 aa, synthetic construct
  source 1..2131: note = Description of Artificial Sequence: Synthetic polypeptide
MPAAKRVKLDGGDKKYSIGLDIGTNSVGWAVITDEYKVPSKKFKVLGNTDRHSIKKNLIGALLFDSGETAEATRLKRTARRRYTRRKNRICYLQEIFSNEMAKVDDSFFHRLEESFLVEEDKKHERHPIFGNIVDEVAYHEKYPTIYHLRKKLVDSTDKADLRLIYLALAHMIKFRGHFLIEGDLNPDNSDVDKLFIQLVQTYNQLFEENPINASGVDAKAILSARLSKSRRLENLIAQLPGEKKNGLFGNLIALSLGLTPNFKSNFDLAEDAKLQLSKDTYDDDLDNLLAQIGDQYADLFLAAKNLSDAILLSDILRVNTEITKAPLSASMIKRYDEHHQDLTLLKALVRQQLPEKYKEIFFDQSKNGYAGYIDGGASQEEFYKFIKPILEKMDGTEELLVKLNREDLLRKQRTFDNGSIPHQIHLGELHAILRRQEDFYPFLKDNREKIEKILTFRIPYYVGPLARGNSRFAWMTRKSEETITPWNFEEVVDKGASAQSFIERMTNFDKNLPNEKVLPKHSLLYEYFTVYNELTKVKYVTEGMRKPAFLSGEQKKAIVDLLFKTNRKVTVKQLKEDYFKKIECFDSVEISGVEDRFNASLGTYHDLLKIIKDKDFLDNEENEDILEDIVLTLTLFEDREMIEERLKTYAHLFDDKVMKQLKRRRYTGWGRLSRKLINGIRDKQSGKTILDFLKSDGFANRNFMQLIHDDSLTFKEDIQKAQVSGQGDSLHEHIANLAGSPAIKKGILQTVKVVDELVKVMGRHKPENIVIEMARENQTTQKGQKNSRERMKRIEEGIKELGSQILKEHPVENTQLQNEKLYLYYLQNGRDMYVDQELDINRLSDYDVDHIVPQSFLKDDSIDNKVLTRSDKARGKSDNVPSEEVVKKMKNYWRQLLNAKLITQRKFDNLTKAERGGLSELDKAGFIKRQLVETRQITKHVAQILDSRMNTKYDENDKLIREVKVITLKSKLVSDFRKDFQFYKVREINNYHHAHDAYLNAVVGTALIKKYPKLESEFVYGDYKVYDVRKMIAKSEQEIGKATAKYFFYSNIMNFFKTEITLANGEIRKRPLIETNGETGEIVWDKGRDFATVRKVLSMPQVNIVKKTEVQTGGFSKESILPKRNSDKLIARKKDWDPKKYGGFDSPTVAYSVLVVAKVEKGKSKKLKSVKELLGITIMERSSFEKNPIDFLEAKGYKEVKKDLIIKLPKYSLFELENGRKRMLASAGELQKGNELALPSKYVNFLYLASHYEKLKGSPEDNEQKQLFVEQHKHYLDEIIEQISEFSKRVILADANLDKVLSAYNKHRDKPIREQAENIIHLFTLTNLGAPAAFKYFDTTIDRKRYTSTKEVLDATLIHQSITGLYETRIDLSQLGGDGGAEAAAKEAAAKEAAAKEAAAKALEAEAAAKEAAAKEAAAKEAAAKAGGTLNIEDEHRLHETSKEPDVSLGSTWLSDFPQAWAETGGMGLAVRQAPLIIPLKATSTPVSIKQYPMSQEARLGIKPHIQRLLDQGILVPCQSPWNTPLLPVKKPGTNDYRPVQDLREVNKRVEDIHPTVPNPYNLLSGLPPSHQWYTVLDLKDAFFCLRLHPTSQPLFAFEWRDPEMGISGQLTWTRLPQGFKNSPTLFDEALHRDLADFRIQHPDLILLQYVDDLLLAATSELDCQQGTRALLQTLGNLGYRASAKKAQICQKQVKYLGYLLKEGQRWLTEARKETVMGQPTPKTPRQLREFLGTAGFCRLWIPGFAEMAAPLYPLTKTGTLFNWGPDQQKAYQEIKQALLTAPALGLPDLTKPFELFVDEKQGYAKGVLTQKLGPWRRPVAYLSKKLDPVAAGWPPCLRMVAAIAVLTKDAGKLTMGQPLVILAPHAVEALVKQPPDRWLSNARMTHYQALLLDTDRVQFGPVVALNPATLLPLPEEGLQHNCLDILAEAHGTRPDLTDQPLPDADHTWYTDGSSLLQEGQRKAGAAVTTETEVIWAKALPAGTSAQRAELIALTQALKMAEGKKLNVYTDSRYAFATAHIHGEIYRRRGLLTSEGKEIKNKDEILALLKALFLPKRLSIIHCPGHQKGHSAEARGNRMADQAARKAAITETPDTSTLLAGKRTADGSEFEKRTADGSEFESPKKKAKVE

SEQ ID NO: 2958 - protein, 2101 aa, synthetic construct
  source 1..2101: note = Description of Artificial Sequence: Synthetic polypeptide
MPAAKRVKLDGGDKKYSIGLDIGTNSVGWAVITDEYKVPSKKFKVLGNTDRHSIKKNLIGALLFDSGETAEATRLKRTARRRYTRRKNRICYLQEIFSNEMAKVDDSFFHRLEESFLVEEDKKHERHPIFGNIVDEVAYHEKYPTIYHLRKKLVDSTDKADLRLIYLALAHMIKFRGHFLIEGDLNPDNSDVDKLFIQLVQTYNQLFEENPINASGVDAKAILSARLSKSRRLENLIAQLPGEKKNGLFGNLIALSLGLTPNFKSNFDLAEDAKLQLSKDTYDDDLDNLLAQIGDQYADLFLAAKNLSDAILLSDILRVNTEITKAPLSASMIKRYDEHHQDLTLLKALVRQQLPEKYKEIFFDQSKNGYAGYIDGGASQEEFYKFIKPILEKMDGTEELLVKLNREDLLRKQRTFDNGSIPHQIHLGELHAILRRQEDFYPFLKDNREKIEKILTFRIPYYVGPLARGNSRFAWMTRKSEETITPWNFEEVVDKGASAQSFIERMTNFDKNLPNEKVLPKHSLLYEYFTVYNELTKVKYVTEGMRKPAFLSGEQKKAIVDLLFKTNRKVTVKQLKEDYFKKIECFDSVEISGVEDRFNASLGTYHDLLKIIKDKDFLDNEENEDILEDIVLTLTLFEDREMIEERLKTYAHLFDDKVMKQLKRRRYTGWGRLSRKLINGIRDKQSGKTILDFLKSDGFANRNFMQLIHDDSLTFKEDIQKAQVSGQGDSLHEHIANLAGSPAIKKGILQTVKVVDELVKVMGRHKPENIVIEMARENQTTQKGQKNSRERMKRIEEGIKELGSQILKEHPVENTQLQNEKLYLYYLQNGRDMYVDQELDINRLSDYDVDHIVPQSFLKDDSIDNKVLTRSDKARGKSDNVPSEEVVKKMKNYWRQLLNAKLITQRKFDNLTKAERGGLSELDKAGFIKRQLVETRQITKHVAQILDSRMNTKYDENDKLIREVKVITLKSKLVSDFRKDFQFYKVREINNYHHAHDAYLNAVVGTALIKKYPKLESEFVYGDYKVYDVRKMIAKSEQEIGKATAKYFFYSNIMNFFKTEITLANGEIRKRPLIETNGETGEIVWDKGRDFATVRKVLSMPQVNIVKKTEVQTGGFSKESILPKRNSDKLIARKKDWDPKKYGGFDSPTVAYSVLVVAKVEKGKSKKLKSVKELLGITIMERSSFEKNPIDFLEAKGYKEVKKDLIIKLPKYSLFELENGRKRMLASAGELQKGNELALPSKYVNFLYLASHYEKLKGSPEDNEQKQLFVEQHKHYLDEIIEQISEFSKRVILADANLDKVLSAYNKHRDKPIREQAENIIHLFTLTNLGAPAAFKYFDTTIDRKRYTSTKEVLDATLIHQSITGLYETRIDLSQLGGDGGSGSETPGTSESATPESGGTLNIEDEHRLHETSKEPDVSLGSTWLSDFPQAWAETGGMGLAVRQAPLIIPLKATSTPVSIKQYPMSQEARLGIKPHIQRLLDQGILVPCQSPWNTPLLPVKKPGTNDYRPVQDLREVNKRVEDIHPTVPNPYNLLSGLPPSHQWYTVLDLKDAFFCLRLHPTSQPLFAFEWRDPEMGISGQLTWTRLPQGFKNSPTLFDEALHRDLADFRIQHPDLILLQYVDDLLLAATSELDCQQGTRALLQTLGNLGYRASAKKAQICQKQVKYLGYLLKEGQRWLTEARKETVMGQPTPKTPRQLREFLGTAGFCRLWIPGFAEMAAPLYPLTKTGTLFNWGPDQQKAYQEIKQALLTAPALGLPDLTKPFELFVDEKQGYAKGVLTQKLGPWRRPVAYLSKKLDPVAAGWPPCLRMVAAIAVLTKDAGKLTMGQPLVILAPHAVEALVKQPPDRWLSNARMTHYQALLLDTDRVQFGPVVALNPATLLPLPEEGLQHNCLDILAEAHGTRPDLTDQPLPDADHTWYTDGSSLLQEGQRKAGAAVTTETEVIWAKALPAGTSAQRAELIALTQALKMAEGKKLNVYTDSRYAFATAHIHGEIYRRRGLLTSEGKEIKNKDEILALLKALFLPKRLSIIHCPGHQKGHSAEARGNRMADQAARKAAITETPDTSTLLAGKRTADGSEFEKRTADGSEFESPKKKAKVE

SEQ ID NO: 2959 - protein, 2096 aa, synthetic construct
  source 1..2096: note = Description of Artificial Sequence: Synthetic polypeptide
MPAAKRVKLDGGDKKYSIGLDIGTNSVGWAVITDEYKVPSKKFKVLGNTDRHSIKKNLIGALLFDSGETAEATRLKRTARRRYTRRKNRICYLQEIFSNEMAKVDDSFFHRLEESFLVEEDKKHERHPIFGNIVDEVAYHEKYPTIYHLRKKLVDSTDKADLRLIYLALAHMIKFRGHFLIEGDLNPDNSDVDKLFIQLVQTYNQLFEENPINASGVDAKAILSARLSKSRRLENLIAQLPGEKKNGLFGNLIALSLGLTPNFKSNFDLAEDAKLQLSKDTYDDDLDNLLAQIGDQYADLFLAAKNLSDAILLSDILRVNTEITKAPLSASMIKRYDEHHQDLTLLKALVRQQLPEKYKEIFFDQSKNGYAGYIDGGASQEEFYKFIKPILEKMDGTEELLVKLNREDLLRKQRTFDNGSIPHQIHLGELHAILRRQEDFYPFLKDNREKIEKILTFRIPYYVGPLARGNSRFAWMTRKSEETITPWNFEEVVDKGASAQSFIERMTNFDKNLPNEKVLPKHSLLYEYFTVYNELTKVKYVTEGMRKPAFLSGEQKKAIVDLLFKTNRKVTVKQLKEDYFKKIECFDSVEISGVEDRFNASLGTYHDLLKIIKDKDFLDNEENEDILEDIVLTLTLFEDREMIEERLKTYAHLFDDKVMKQLKRRRYTGWGRLSRKLINGIRDKQSGKTILDFLKSDGFANRNFMQLIHDDSLTFKEDIQKAQVSGQGDSLHEHIANLAGSPAIKKGILQTVKVVDELVKVMGRHKPENIVIEMARENQTTQKGQKNSRERMKRIEEGIKELGSQILKEHPVENTQLQNEKLYLYYLQNGRDMYVDQELDINRLSDYDVDHIVPQSFLKDDSIDNKVLTRSDKARGKSDNVPSEEVVKKMKNYWRQLLNAKLITQRKFDNLTKAERGGLSELDKAGFIKRQLVETRQITKHVAQILDSRMNTKYDENDKLIREVKVITLKSKLVSDFRKDFQFYKVREINNYHHAHDAYLNAVVGTALIKKYPKLESEFVYGDYKVYDVRKMIAKSEQEIGKATAKYFFYSNIMNFFKTEITLANGEIRKRPLIETNGETGEIVWDKGRDFATVRKVLSMPQVNIVKKTEVQTGGFSKESILPKRNSDKLIARKKDWDPKKYGGFDSPTVAYSVLVVAKVEKGKSKKLKSVKELLGITIMERSSFEKNPIDFLEAKGYKEVKKDLIIKLPKYSLFELENGRKRMLASAGELQKGNELALPSKYVNFLYLASHYEKLKGSPEDNEQKQLFVEQHKHYLDEIIEQISEFSKRVILADANLDKVLSAYNKHRDKPIREQAENIIHLFTLTNLGAPAAFKYFDTTIDRKRYTSTKEVLDATLIHQSITGLYETRIDLSQLGGDGGEAAAKGGSGGGGGTLNIEDEHRLHETSKEPDVSLGSTWLSDFPQAWAETGGMGLAVRQAPLIIPLKATSTPVSIKQYPMSQEARLGIKPHIQRLLDQGILVPCQSPWNTPLLPVKKPGTNDYRPVQDLREVNKRVEDIHPTVPNPYNLLSGLPPSHQWYTVLDLKDAFFCLRLHPTSQPLFAFEWRDPEMGISGQLTWTRLPQGFKNSPTLFDEALHRDLADFRIQHPDLILLQYVDDLLLAATSELDCQQGTRALLQTLGNLGYRASAKKAQICQKQVKYLGYLLKEGQRWLTEARKETVMGQPTPKTPRQLREFLGTAGFCRLWIPGFAEMAAPLYPLTKTGTLFNWGPDQQKAYQEIKQALLTAPALGLPDLTKPFELFVDEKQGYAKGVLTQKLGPWRRPVAYLSKKLDPVAAGWPPCLRMVAAIAVLTKDAGKLTMGQPLVILAPHAVEALVKQPPDRWLSNARMTHYQALLLDTDRVQFGPVVALNPATLLPLPEEGLQHNCLDILAEAHGTRPDLTDQPLPDADHTWYTDGSSLLQEGQRKAGAAVTTETEVIWAKALPAGTSAQRAELIALTQALKMAEGKKLNVYTDSRYAFATAHIHGEIYRRRGLLTSEGKEIKNKDEILALLKALFLPKRLSIIHCPGHQKGHSAEARGNRMADQAARKAAITETPDTSTLLAGKRTADGSEFEKRTADGSEFESPKKKAKVE

SEQ ID NO: 2960 - protein, 2096 aa, synthetic construct
  source 1..2096: note = Description of Artificial Sequence: Synthetic polypeptide
MPAAKRVKLDGGDKKYSIGLDIGTNSVGWAVITDEYKVPSKKFKVLGNTDRHSIKKNLIGALLFDSGETAEATRLKRTARRRYTRRKNRICYLQEIFSNEMAKVDDSFFHRLEESFLVEEDKKHERHPIFGNIVDEVAYHEKYPTIYHLRKKLVDSTDKADLRLIYLALAHMIKFRGHFLIEGDLNPDNSDVDKLFIQLVQTYNQLFEENPINASGVDAKAILSARLSKSRRLENLIAQLPGEKKNGLFGNLIALSLGLTPNFKSNFDLAEDAKLQLSKDTYDDDLDNLLAQIGDQYADLFLAAKNLSDAILLSDILRVNTEITKAPLSASMIKRYDEHHQDLTLLKALVRQQLPEKYKEIFFDQSKNGYAGYIDGGASQEEFYKFIKPILEKMDGTEELLVKLNREDLLRKQRTFDNGSIPHQIHLGELHAILRRQEDFYPFLKDNREKIEKILTFRIPYYVGPLARGNSRFAWMTRKSEETITPWNFEEVVDKGASAQSFIERMTNFDKNLPNEKVLPKHSLLYEYFTVYNELTKVKYVTEGMRKPAFLSGEQKKAIVDLLFKTNRKVTVKQLKEDYFKKIECFDSVEISGVEDRFNASLGTYHDLLKIIKDKDFLDNEENEDILEDIVLTLTLFEDREMIEERLKTYAHLFDDKVMKQLKRRRYTGWGRLSRKLINGIRDKQSGKTILDFLKSDGFANRNFMQLIHDDSLTFKEDIQKAQVSGQGDSLHEHIANLAGSPAIKKGILQTVKVVDELVKVMGRHKPENIVIEMARENQTTQKGQKNSRERMKRIEEGIKELGSQILKEHPVENTQLQNEKLYLYYLQNGRDMYVDQELDINRLSDYDVDHIVPQSFLKDDSIDNKVLTRSDKARGKSDNVPSEEVVKKMKNYWRQLLNAKLITQRKFDNLTKAERGGLSELDKAGFIKRQLVETRQITKHVAQILDSRMNTKYDENDKLIREVKVITLKSKLVSDFRKDFQFYKVREINNYHHAHDAYLNAVVGTALIKKYPKLESEFVYGDYKVYDVRKMIAKSEQEIGKATAKYFFYSNIMNFFKTEITLANGEIRKRPLIETNGETGEIVWDKGRDFATVRKVLSMPQVNIVKKTEVQTGGFSKESILPKRNSDKLIARKKDWDPKKYGGFDSPTVAYSVLVVAKVEKGKSKKLKSVKELLGITIMERSSFEKNPIDFLEAKGYKEVKKDLIIKLPKYSLFELENGRKRMLASAGELQKGNELALPSKYVNFLYLASHYEKLKGSPEDNEQKQLFVEQHKHYLDEIIEQISEFSKRVILADANLDKVLSAYNKHRDKPIREQAENIIHLFTLTNLGAPAAFKYFDTTIDRKRYTSTKEVLDATLIHQSITGLYETRIDLSQLGGDGGGGSEAAAKGSSGGTLNIEDEHRLHETSKEPDVSLGSTWLSDFPQAWAETGGMGLAVRQAPLIIPLKATSTPVSIKQYPMSQEARLGIKPHIQRLLDQGILVPCQSPWNTPLLPVKKPGTNDYRPVQDLREVNKRVEDIHPTVPNPYNLLSGLPPSHQWYTVLDLKDAFFCLRLHPTSQPLFAFEWRDPEMGISGQLTWTRLPQGFKNSPTLFDEALHRDLADFRIQHPDLILLQYVDDLLLAATSELDCQQGTRALLQTLGNLGYRASAKKAQICQKQVKYLGYLLKEGQRWLTEARKETVMGQPTPKTPRQLREFLGTAGFCRLWIPGFAEMAAPLYPLTKTGTLFNWGPDQQKAYQEIKQALLTAPALGLPDLTKPFELFVDEKQGYAKGVLTQKLGPWRRPVAYLSKKLDPVAAGWPPCLRMVAAIAVLTKDAGKLTMGQPLVILAPHAVEALVKQPPDRWLSNARMTHYQALLLDTDRVQFGPVVALNPATLLPLPEEGLQHNCLDILAEAHGTRPDLTDQPLPDADHTWYTDGSSLLQEGQRKAGAAVTTETEVIWAKALPAGTSAQRAELIALTQALKMAEGKKLNVYTDSRYAFATAHIHGEIYRRRGLLTSEGKEIKNKDEILALLKALFLPKRLSIIHCPGHQKGHSAEARGNRMADQAARKAAITETPDTSTLLAGKRTADGSEFEKRTADGSEFESPKKKAKVE

SEQ ID NO: 2961 - protein, 2096 aa, synthetic construct
  source 1..2096: note = Description of Artificial Sequence: Synthetic polypeptide
MPAAKRVKLDGGDKKYSIGLDIGTNSVGWAVITDEYKVPSKKFKVLGNTDRHSIKKNLIGALLFDSGETAEATRLKRTARRRYTRRKNRICYLQEIFSNEMAKVDDSFFHRLEESFLVEEDKKHERHPIFGNIVDEVAYHEKYPTIYHLRKKLVDSTDKADLRLIYLALAHMIKFRGHFLIEGDLNPDNSDVDKLFIQLVQTYNQLFEENPINASGVDAKAILSARLSKSRRLENLIAQLPGEKKNGLFGNLIALSLGLTPNFKSNFDLAEDAKLQLSKDTYDDDLDNLLAQIGDQYADLFLAAKNLSDAILLSDILRVNTEITKAPLSASMIKRYDEHHQDLTLLKALVRQQLPEKYKEIFFDQSKNGYAGYIDGGASQEEFYKFIKPILEKMDGTEELLVKLNREDLLRKQRTFDNGSIPHQIHLGELHAILRRQEDFYPFLKDNREKIEKILTFRIPYYVGPLARGNSRFAWMTRKSEETITPWNFEEVVDKGASAQSFIERMTNFDKNLPNEKVLPKHSLLYEYFTVYNELTKVKYVTEGMRKPAFLSGEQKKAIVDLLFKTNRKVTVKQLKEDYFKKIECFDSVEISGVEDRFNASLGTYHDLLKIIKDKDFLDNEENEDILEDIVLTLTLFEDREMIEERLKTYAHLFDDKVMKQLKRRRYTGWGRLSRKLINGIRDKQSGKTILDFLKSDGFANRNFMQLIHDDSLTFKEDIQKAQVSGQGDSLHEHIANLAGSPAIKKGILQTVKVVDELVKVMGRHKPENIVIEMARENQTTQKGQKNSRERMKRIEEGIKELGSQILKEHPVENTQLQNEKLYLYYLQNGRDMYVDQELDINRLSDYDVDHIVPQSFLKDDSIDNKVLTRSDKARGKSDNVPSEEVVKKMKNYWRQLLNAKLITQRKFDNLTKAERGGLSELDKAGFIKRQLVETRQITKHVAQILDSRMNTKYDENDKLIREVKVITLKSKLVSDFRKDFQFYKVREINNYHHAHDAYLNAVVGTALIKKYPKLESEFVYGDYKVYDVRKMIAKSEQEIGKATAKYFFYSNIMNFFKTEITLANGEIRKRPLIETNGETGEIVWDKGRDFATVRKVLSMPQVNIVKKTEVQTGGFSKESILPKRNSDKLIARKKDWDPKKYGGFDSPTVAYSVLVVAKVEKGKSKKLKSVKELLGITIMERSSFEKNPIDFLEAKGYKEVKKDLIIKLPKYSLFELENGRKRMLASAGELQKGNELALPSKYVNFLYLASHYEKLKGSPEDNEQKQLFVEQHKHYLDEIIEQISEFSKRVILADANLDKVLSAYNKHRDKPIREQAENIIHLFTLTNLGAPAAFKYFDTTIDRKRYTSTKEVLDATLIHQSITGLYETRIDLSQLGGDGGPAPGGSEAAAKGGTLNIEDEHRLHETSKEPDVSLGSTWLSDFPQAWAETGGMGLAVRQAPLIIPLKATSTPVSIKQYPMSQEARLGIKPHIQRLLDQGILVPCQSPWNTPLLPVKKPGTNDYRPVQDLREVNKRVEDIHPTVPNPYNLLSGLPPSHQWYTVLDLKDAFFCLRLHPTSQPLFAFEWRDPEMGISGQLTWTRLPQGFKNSPTLFDEALHRDLADFRIQHPDLILLQYVDDLLLAATSELDCQQGTRALLQTLGNLGYRASAKKAQICQKQVKYLGYLLKEGQRWLTEARKETVMGQPTPKTPRQLREFLGTAGFCRLWIPGFAEMAAPLYPLTKTGTLFNWGPDQQKAYQEIKQALLTAPALGLPDLTKPFELFVDEKQGYAKGVLTQKLGPWRRPVAYLSKKLDPVAAGWPPCLRMVAAIAVLTKDAGKLTMGQPLVILAPHAVEALVKQPPDRWLSNARMTHYQALLLDTDRVQFGPVVALNPATLLPLPEEGLQHNCLDILAEAHGTRPDLTDQPLPDADHTWYTDGSSLLQEGQRKAGAAVTTETEVIWAKALPAGTSAQRAELIALTQALKMAEGKKLNVYTDSRYAFATAHIHGEIYRRRGLLTSEGKEIKNKDEILALLKALFLPKRLSIIHCPGHQKGHSAEARGNRMADQAARKAAITETPDTSTLLAGKRTADGSEFEKRTADGSEFESPKKKAKVE

SEQ ID NO: 2962 - protein, 2093 aa, synthetic construct
  source 1..2093: note = Description of Artificial Sequence: Synthetic polypeptide
MPAAKRVKLDGGDKKYSIGLDIGTNSVGWAVITDEYKVPSKKFKVLGNTDRHSIKKNLIGALLFDSGETAEATRLKRTARRRYTRRKNRICYLQEIFSNEMAKVDDSFFHRLEESFLVEEDKKHERHPIFGNIVDEVAYHEKYPTIYHLRKKLVDSTDKADLRLIYLALAHMIKFRGHFLIEGDLNPDNSDVDKLFIQLVQTYNQLFEENPINASGVDAKAILSARLSKSRRLENLIAQLPGEKKNGLFGNLIALSLGLTPNFKSNFDLAEDAKLQLSKDTYDDDLDNLLAQIGDQYADLFLAAKNLSDAILLSDILRVNTEITKAPLSASMIKRYDEHHQDLTLLKALVRQQLPEKYKEIFFDQSKNGYAGYIDGGASQEEFYKFIKPILEKMDGTEELLVKLNREDLLRKQRTFDNGSIPHQIHLGELHAILRRQEDFYPFLKDNREKIEKILTFRIPYYVGPLARGNSRFAWMTRKSEETITPWNFEEVVDKGASAQSFIERMTNFDKNLPNEKVLPKHSLLYEYFTVYNELTKVKYVTEGMRKPAFLSGEQKKAIVDLLFKTNRKVTVKQLKEDYFKKIECFDSVEISGVEDRFNASLGTYHDLLKIIKDKDFLDNEENEDILEDIVLTLTLFEDREMIEERLKTYAHLFDDKVMKQLKRRRYTGWGRLSRKLINGIRDKQSGKTILDFLKSDGFANRNFMQLIHDDSLTFKEDIQKAQVSGQGDSLHEHIANLAGSPAIKKGILQTVKVVDELVKVMGRHKPENIVIEMARENQTTQKGQKNSRERMKRIEEGIKELGSQILKEHPVENTQLQNEKLYLYYLQNGRDMYVDQELDINRLSDYDVDHIVPQSFLKDDSIDNKVLTRSDKARGKSDNVPSEEVVKKMKNYWRQLLNAKLITQRKFDNLTKAERGGLSELDKAGFIKRQLVETRQITKHVAQILDSRMNTKYDENDKLIREVKVITLKSKLVSDFRKDFQFYKVREINNYHHAHDAYLNAVVGTALIKKYPKLESEFVYGDYKVYDVRKMIAKSEQEIGKATAKYFFYSNIMNFFKTEITLANGEIRKRPLIETNGETGEIVWDKGRDFATVRKVLSMPQVNIVKKTEVQTGGFSKESILPKRNSDKLIARKKDWDPKKYGGFDSPTVAYSVLVVAKVEKGKSKKLKSVKELLGITIMERSSFEKNPIDFLEAKGYKEVKKDLIIKLPKYSLFELENGRKRMLASAGELQKGNELALPSKYVNFLYLASHYEKLKGSPEDNEQKQLFVEQHKHYLDEIIEQISEFSKRVILADANLDKVLSAYNKHRDKPIREQAENIIHLFTLTNLGAPAAFKYFDTTIDRKRYTSTKEVLDATLIHQSITGLYETRIDLSQLGGDGGGGSEAAAKGGTLNIEDEHRLHETSKEPDVSLGSTWLSDFPQAWAETGGMGLAVRQAPLIIPLKATSTPVSIKQYPMSQEARLGIKPHIQRLLDQGILVPCQSPWNTPLLPVKKPGTNDYRPVQDLREVNKRVEDIHPTVPNPYNLLSGLPPSHQWYTVLDLKDAFFCLRLHPTSQPLFAFEWRDPEMGISGQLTWTRLPQGFKNSPTLFDEALHRDLADFRIQHPDLILLQYVDDLLLAATSELDCQQGTRALLQTLGNLGYRASAKKAQICQKQVKYLGYLLKEGQRWLTEARKETVMGQPTPKTPRQLREFLGTAGFCRLWIPGFAEMAAPLYPLTKTGTLFNWGPDQQKAYQEIKQALLTAPALGLPDLTKPFELFVDEKQGYAKGVLTQKLGPWRRPVAYLSKKLDPVAAGWPPCLRMVAAIAVLTKDAGKLTMGQPLVILAPHAVEALVKQPPDRWLSNARMTHYQALLLDTDRVQFGPVVALNPATLLPLPEEGLQHNCLDILAEAHGTRPDLTDQPLPDADHTWYTDGSSLLQEGQRKAGAAVTTETEVIWAKALPAGTSAQRAELIALTQALKMAEGKKLNVYTDSRYAFATAHIHGEIYRRRGLLTSEGKEIKNKDEILALLKALFLPKRLSIIHCPGHQKGHSAEARGNRMADQAARKAAITETPDTSTLLAGKRTADGSEFEKRTADGSEFESPKKKAKVE

SEQ ID NO: 2963 - protein, 2088 aa, synthetic construct
  source 1..2088: note = Description of Artificial Sequence: Synthetic polypeptide
MPAAKRVKLDGGDKKYSIGLDIGTNSVGWAVITDEYKVPSKKFKVLGNTDRHSIKKNLIGALLFDSGETAEATRLKRTARRRYTRRKNRICYLQEIFSNEMAKVDDSFFHRLEESFLVEEDKKHERHPIFGNIVDEVAYHEKYPTIYHLRKKLVDSTDKADLRLIYLALAHMIKFRGHFLIEGDLNPDNSDVDKLFIQLVQTYNQLFEENPINASGVDAKAILSARLSKSRRLENLIAQLPGEKKNGLFGNLIALSLGLTPNFKSNFDLAEDAKLQLSKDTYDDDLDNLLAQIGDQYADLFLAAKNLSDAILLSDILRVNTEITKAPLSASMIKRYDEHHQDLTLLKALVRQQLPEKYKEIFFDQSKNGYAGYIDGGASQEEFYKFIKPILEKMDGTEELLVKLNREDLLRKQRTFDNGSIPHQIHLGELHAILRRQEDFYPFLKDNREKIEKILTFRIPYYVGPLARGNSRFAWMTRKSEETITPWNFEEVVDKGASAQSFIERMTNFDKNLPNEKVLPKHSLLYEYFTVYNELTKVKYVTEGMRKPAFLSGEQKKAIVDLLFKTNRKVTVKQLKEDYFKKIECFDSVEISGVEDRFNASLGTYHDLLKIIKDKDFLDNEENEDILEDIVLTLTLFEDREMIEERLKTYAHLFDDKVMKQLKRRRYTGWGRLSRKLINGIRDKQSGKTILDFLKSDGFANRNFMQLIHDDSLTFKEDIQKAQVSGQGDSLHEHIANLAGSPAIKKGILQTVKVVDELVKVMGRHKPENIVIEMARENQTTQKGQKNSRERMKRIEEGIKELGSQILKEHPVENTQLQNEKLYLYYLQNGRDMYVDQELDINRLSDYDVDHIVPQSFLKDDSIDNKVLTRSDKARGKSDNVPSEEVVKKMKNYWRQLLNAKLITQRKFDNLTKAERGGLSELDKAGFIKRQLVETRQITKHVAQILDSRMNTKYDENDKLIREVKVITLKSKLVSDFRKDFQFYKVREINNYHHAHDAYLNAVVGTALIKKYPKLESEFVYGDYKVYDVRKMIAKSEQEIGKATAKYFFYSNIMNFFKTEITLANGEIRKRPLIETNGETGEIVWDKGRDFATVRKVLSMPQVNIVKKTEVQTGGFSKESILPKRNSDKLIARKKDWDPKKYGGFDSPTVAYSVLVVAKVEKGKSKKLKSVKELLGITIMERSSFEKNPIDFLEAKGYKEVKKDLIIKLPKYSLFELENGRKRMLASAGELQKGNELALPSKYVNFLYLASHYEKLKGSPEDNEQKQLFVEQHKHYLDEIIEQISEFSKRVILADANLDKVLSAYNKHRDKPIREQAENIIHLFTLTNLGAPAAFKYFDTTIDRKRYTSTKEVLDATLIHQSITGLYETRIDLSQLGGDGGGSSGGTLNIEDEHRLHETSKEPDVSLGSTWLSDFPQAWAETGGMGLAVRQAPLIIPLKATSTPVSIKQYPMSQEARLGIKPHIQRLLDQGILVPCQSPWNTPLLPVKKPGTNDYRPVQDLREVNKRVEDIHPTVPNPYNLLSGLPPSHQWYTVLDLKDAFFCLRLHPTSQPLFAFEWRDPEMGISGQLTWTRLPQGFKNSPTLFDEALHRDLADFRIQHPDLILLQYVDDLLLAATSELDCQQGTRALLQTLGNLGYRASAKKAQICQKQVKYLGYLLKEGQRWLTEARKETVMGQPTPKTPRQLREFLGTAGFCRLWIPGFAEMAAPLYPLTKTGTLFNWGPDQQKAYQEIKQALLTAPALGLPDLTKPFELFVDEKQGYAKGVLTQKLGPWRRPVAYLSKKLDPVAAGWPPCLRMVAAIAVLTKDAGKLTMGQPLVILAPHAVEALVKQPPDRWLSNARMTHYQALLLDTDRVQFGPVVALNPATLLPLPEEGLQHNCLDILAEAHGTRPDLTDQPLPDADHTWYTDGSSLLQEGQRKAGAAVTTETEVIWAKALPAGTSAQRAELIALTQALKMAEGKKLNVYTDSRYAFATAHIHGEIYRRRGLLTSEGKEIKNKDEILALLKALFLPKRLSIIHCPGHQKGHSAEARGNRMADQAARKAAITETPDTSTLLAGKRTADGSEFEKRTADGSEFESPKKKAKVE

SEQ ID NO: 2964 - protein, 2094 aa, synthetic construct
  source 1..2094: note = Description of Artificial Sequence: Synthetic polypeptide
MPAAKRVKLDGGDKKYSIGLDIGTNSVGWAVITDEYKVPSKKFKVLGNTDRHSIKKNLIGALLFDSGETAEATRLKRTARRRYTRRKNRICYLQEIFSNEMAKVDDSFFHRLEESFLVEEDKKHERHPIFGNIVDEVAYHEKYPTIYHLRKKLVDSTDKADLRLIYLALAHMIKFRGHFLIEGDLNPDNSDVDKLFIQLVQTYNQLFEENPINASGVDAKAILSARLSKSRRLENLIAQLPGEKKNGLFGNLIALSLGLTPNFKSNFDLAEDAKLQLSKDTYDDDLDNLLAQIGDQYADLFLAAKNLSDAILLSDILRVNTEITKAPLSASMIKRYDEHHQDLTLLKALVRQQLPEKYKEIFFDQSKNGYAGYIDGGASQEEFYKFIKPILEKMDGTEELLVKLNREDLLRKQRTFDNGSIPHQIHLGELHAILRRQEDFYPFLKDNREKIEKILTFRIPYYVGPLARGNSRFAWMTRKSEETITPWNFEEVVDKGASAQSFIERMTNFDKNLPNEKVLPKHSLLYEYFTVYNELTKVKYVTEGMRKPAFLSGEQKKAIVDLLFKTNRKVTVKQLKEDYFKKIECFDSVEISGVEDRFNASLGTYHDLLKIIKDKDFLDNEENEDILEDIVLTLTLFEDREMIEERLKTYAHLFDDKVMKQLKRRRYTGWGRLSRKLINGIRDKQSGKTILDFLKSDGFANRNFMQLIHDDSLTFKEDIQKAQVSGQGDSLHEHIANLAGSPAIKKGILQTVKVVDELVKVMGRHKPENIVIEMARENQTTQKGQKNSRERMKRIEEGIKELGSQILKEHPVENTQLQNEKLYLYYLQNGRDMYVDQELDINRLSDYDVDHIVPQSFLKDDSIDNKVLTRSDKARGKSDNVPSEEVVKKMKNYWRQLLNAKLITQRKFDNLTKAERGGLSELDKAGFIKRQLVETRQITKHVAQILDSRMNTKYDENDKLIREVKVITLKSKLVSDFRKDFQFYKVREINNYHHAHDAYLNAVVGTALIKKYPKLESEFVYGDYKVYDVRKMIAKSEQEIGKATAKYFFYSNIMNFFKTEITLANGEIRKRPLIETNGETGEIVWDKGRDFATVRKVLSMPQVNIVKKTEVQTGGFSKESILPKRNSDKLIARKKDWDPKKYGGFDSPTVAYSVLVVAKVEKGKSKKLKSVKELLGITIMERSSFEKNPIDFLEAKGYKEVKKDLIIKLPKYSLFELENGRKRMLASAGELQKGNELALPSKYVNFLYLASHYEKLKGSPEDNEQKQLFVEQHKHYLDEIIEQISEFSKRVILADANLDKVLSAYNKHRDKPIREQAENIIHLFTLTNLGAPAAFKYFDTTIDRKRYTSTKEVLDATLIHQSITGLYETRIDLSQLGGDGGGGSGSSPAPGGTLNIEDEHRLHETSKEPDVSLGSTWLSDFPQAWAETGGMGLAVRQAPLIIPLKATSTPVSIKQYPMSQEARLGIKPHIQRLLDQGILVPCQSPWNTPLLPVKKPGTNDYRPVQDLREVNKRVEDIHPTVPNPYNLLSGLPPSHQWYTVLDLKDAFFCLRLHPTSQPLFAFEWRDPEMGISGQLTWTRLPQGFKNSPTLFDEALHRDLADFRIQHPDLILLQYVDDLLLAATSELDCQQGTRALLQTLGNLGYRASAKKAQICQKQVKYLGYLLKEGQRWLTEARKETVMGQPTPKTPRQLREFLGTAGFCRLWIPGFAEMAAPLYPLTKTGTLFNWGPDQQKAYQEIKQALLTAPALGLPDLTKPFELFVDEKQGYAKGVLTQKLGPWRRPVAYLSKKLDPVAAGWPPCLRMVAAIAVLTKDAGKLTMGQPLVILAPHAVEALVKQPPDRWLSNARMTHYQALLLDTDRVQFGPVVALNPATLLPLPEEGLQHNCLDILAEAHGTRPDLTDQPLPDADHTWYTDGSSLLQEGQRKAGAAVTTETEVIWAKALPAGTSAQRAELIALTQALKMAEGKKLNVYTDSRYAFATAHIHGEIYRRRGLLTSEGKEIKNKDEILALLKALFLPKRLSIIHCPGHQKGHSAEARGNRMADQAARKAAITETPDTSTLLAGKRTADGSEFEKRTADGSEFESPKKKAKVE

SEQ ID NO: 2965 - protein, 2103 aa, synthetic construct
  source 1..2103: note = Description of Artificial Sequence: Synthetic polypeptide
MPAAKRVKLDGGDKKYSIGLDIGTNSVGWAVITDEYKVPSKKFKVLGNTDRHSIKKNLIGALLFDSGETAEATRLKRTARRRYTRRKNRICYLQEIFSNEMAKVDDSFFHRLEESFLVEEDKKHERHPIFGNIVDEVAYHEKYPTIYHLRKKLVDSTDKADLRLIYLALAHMIKFRGHFLIEGDLNPDNSDVDKLFIQLVQTYNQLFEENPINASGVDAKAILSARLSKSRRLENLIAQLPGEKKNGLFGNLIALSLGLTPNFKSNFDLAEDAKLQLSKDTYDDDLDNLLAQIGDQYADLFLAAKNLSDAILLSDILRVNTEITKAPLSASMIKRYDEHHQDLTLLKALVRQQLPEKYKEIFFDQSKNGYAGYIDGGASQEEFYKFIKPILEKMDGTEELLVKLNREDLLRKQRTFDNGSIPHQIHLGELHAILRRQEDFYPFLKDNREKIEKILTFRIPYYVGPLARGNSRFAWMTRKSEETITPWNFEEVVDKGASAQSFIERMTNFDKNLPNEKVLPKHSLLYEYFTVYNELTKVKYVTEGMRKPAFLSGEQKKAIVDLLFKTNRKVTVKQLKEDYFKKIECFDSVEISGVEDRFNASLGTYHDLLKIIKDKDFLDNEENEDILEDIVLTLTLFEDREMIEERLKTYAHLFDDKVMKQLKRRRYTGWGRLSRKLINGIRDKQSGKTILDFLKSDGFANRNFMQLIHDDSLTFKEDIQKAQVSGQGDSLHEHIANLAGSPAIKKGILQTVKVVDELVKVMGRHKPENIVIEMARENQTTQKGQKNSRERMKRIEEGIKELGSQILKEHPVENTQLQNEKLYLYYLQNGRDMYVDQELDINRLSDYDVDHIVPQSFLKDDSIDNKVLTRSDKARGKSDNVPSEEVVKKMKNYWRQLLNAKLITQRKFDNLTKAERGGLSELDKAGFIKRQLVETRQITKHVAQILDSRMNTKYDENDKLIREVKVITLKSKLVSDFRKDFQFYKVREINNYHHAHDAYLNAVVGTALIKKYPKLESEFVYGDYKVYDVRKMIAKSEQEIGKATAKYFFYSNIMNFFKTEITLANGEIRKRPLIETNGETGEIVWDKGRDFATVRKVLSMPQVNIVKKTEVQTGGFSKESILPKRNSDKLIARKKDWDPKKYGGFDSPTVAYSVLVVAKVEKGKSKKLKSVKELLGITIMERSSFEKNPIDFLEAKGYKEVKKDLIIKLPKYSLFELENGRKRMLASAGELQKGNELALPSKYVNFLYLASHYEKLKGSPEDNEQKQLFVEQHKHYLDEIIEQISEFSKRVILADANLDKVLSAYNKHRDKPIREQAENIIHLFTLTNLGAPAAFKYFDTTIDRKRYTSTKEVLDATLIHQSITGLYETRIDLSQLGGDGGGSSGSSGSSGSSGSSGSSGGTLNIEDEHRLHETSKEPDVSLGSTWLSDFPQAWAETGGMGLAVRQAPLIIPLKATSTPVSIKQYPMSQEARLGIKPHIQRLLDQGILVPCQSPWNTPLLPVKKPGTNDYRPVQDLREVNKRVEDIHPTVPNPYNLLSGLPPSHQWYTVLDLKDAFFCLRLHPTSQPLFAFEWRDPEMGISGQLTWTRLPQGFKNSPTLFNEALHRDLADFRIQHPDLILLQYVDDLLLAATSELDCQQGTRALLQTLGNLGYRASAKKAQICQKQVKYLGYLLKEGQRWLTEARKETVMGQPTPKTPRQLREFLGTAGFCRLWIPGFAEMAAPLYPLTKPGTLFNWGPDQQKAYQEIKQALLTAPALGLPDLTKPFELFVDEKQGYAKGVLTQKLGPWRRPVAYLSKKLDPVAAGWPPCLRMVAAIAVLTKDAGKLTMGQPLVILAPHAVEALVKQPPDRWLSNARMTHYQALLLDTDRVQFGPVVALNPATLLPLPEEGLQHNCLDILAEAHGTRPDLTDQPLPDADHTWYTDGSSLLQEGQRKAGAAVTTETEVIWAKALPAGTSAQRAELIALTQALKMAEGKKLNVYTDSRYAFATAHIHGEIYRRRGWLTSEGKEIKNKDEILALLKALFLPKRLSIIHCPGHQKGHSAEARGNRMADQAARKAAITETPDTSTLLAGKRTADGSEFEKRTADGSEFESPKKKAKVE

SEQ ID NO: 2966 - protein, 2096 aa, synthetic construct; identical to SEQ ID NO: 2713
  source 1..2096: note = Description of Artificial Sequence: Synthetic polypeptide

SEQ ID NO: 2967 - protein, 2091 aa, synthetic construct
  source 1..2091: note = Description of Artificial Sequence: Synthetic polypeptide
MPAAKRVKLDGGDKKYSIGLDIGTNSVGWAVITDEYKVPSKKFKVLGNTDRHSIKKNLIGALLFDSGETAEATRLKRTARRRYTRRKNRICYLQEIFSNEMAKVDDSFFHRLEESFLVEEDKKHERHPIFGNIVDEVAYHEKYPTIYHLRKKLVDSTDKADLRLIYLALAHMIKFRGHFLIEGDLNPDNSDVDKLFIQLVQTYNQLFEENPINASGVDAKAILSARLSKSRRLENLIAQLPGEKKNGLFGNLIALSLGLTPNFKSNFDLAEDAKLQLSKDTYDDDLDNLLAQIGDQYADLFLAAKNLSDAILLSDILRVNTEITKAPLSASMIKRYDEHHQDLTLLKALVRQQLPEKYKEIFFDQSKNGYAGYIDGGASQEEFYKFIKPILEKMDGTEELLVKLNREDLLRKQRTFDNGSIPHQIHLGELHAILRRQEDFYPFLKDNREKIEKILTFRIPYYVGPLARGNSRFAWMTRKSEETITPWNFEEVVDKGASAQSFIERMTNFDKNLPNEKVLPKHSLLYEYFTVYNELTKVKYVTEGMRKPAFLSGEQKKAIVDLLFKTNRKVTVKQLKEDYFKKIECFDSVEISGVEDRFNASLGTYHDLLKIIKDKDFLDNEENEDILEDIVLTLTLFEDREMIEERLKTYAHLFDDKVMKQLKRRRYTGWGRLSRKLINGIRDKQSGKTILDFLKSDGFANRNFMQLIHDDSLTFKEDIQKAQVSGQGDSLHEHIANLAGSPAIKKGILQTVKVVDELVKVMGRHKPENIVIEMARENQTTQKGQKNSRERMKRIEEGIKELGSQILKEHPVENTQLQNEKLYLYYLQNGRDMYVDQELDINRLSDYDVDHIVPQSFLKDDSIDNKVLTRSDKARGKSDNVPSEEVVKKMKNYWRQLLNAKLITQRKFDNLTKAERGGLSELDKAGFIKRQLVETRQITKHVAQILDSRMNTKYDENDKLIREVKVITLKSKLVSDFRKDFQFYKVREINNYHHAHDAYLNAVVGTALIKKYPKLESEFVYGDYKVYDVRKMIAKSEQEIGKATAKYFFYSNIMNFFKTEITLANGEIRKRPLIETNGETGEIVWDKGRDFATVRKVLSMPQVNIVKKTEVQTGGFSKESILPKRNSDKLIARKKDWDPKKYGGFDSPTVAYSVLVVAKVEKGKSKKLKSVKELLGITIMERSSFEKNPIDFLEAKGYKEVKKDLIIKLPKYSLFELENGRKRMLASAGELQKGNELALPSKYVNFLYLASHYEKLKGSPEDNEQKQLFVEQHKHYLDEIIEQISEFSKRVILADANLDKVLSAYNKHRDKPIREQAENIIHLFTLTNLGAPAAFKYFDTTIDRKRYTSTKEVLDATLIHQSITGLYETRIDLSQLGGDGGGSSGGGGGTLNIEDEHRLHETSKEPDVSLGSTWLSDFPQAWAETGGMGLAVRQAPLIIPLKATSTPVSIKQYPMSQEARLGIKPHIQRLLDQGILVPCQSPWNTPLLPVKKPGTNDYRPVQDLREVNKRVEDIHPTVPNPYNLLSGLPPSHQWYTVLDLKDAFFCLRLHPTSQPLFAFEWRDPEMGISGQLTWTRLPQGFKNSPTLFNEALHRDLADFRIQHPDLILLQYVDDLLLAATSELDCQQGTRALLQTLGNLGYRASAKKAQICQKQVKYLGYLLKEGQRWLTEARKETVMGQPTPKTPRQLREFLGTAGFCRLWIPGFAEMAAPLYPLTKPGTLFNWGPDQQKAYQEIKQALLTAPALGLPDLTKPFELFVDEKQGYAKGVLTQKLGPWRRPVAYLSKKLDPVAAGWPPCLRMVAAIAVLTKDAGKLTMGQPLVILAPHAVEALVKQPPDRWLSNARMTHYQALLLDTDRVQFGPVVALNPATLLPLPEEGLQHNCLDILAEAHGTRPDLTDQPLPDADHTWYTDGSSLLQEGQRKAGAAVTTETEVIWAKALPAGTSAQRAELIALTQALKMAEGKKLNVYTDSRYAFATAHIHGEIYRRRGWLTSEGKEIKNKDEILALLKALFLPKRLSIIHCPGHQKGHSAEARGNRMADQAARKAAITETPDTSTLLAGKRTADGSEFEKRTADGSEFESPKKKAKVE

SEQ ID NO: 2968 - protein, 2105 aa, synthetic construct; identical to SEQ ID NO: 2771
  source 1..2105: note = Description of Artificial Sequence: Synthetic polypeptide

SEQ ID NO: 2969 - protein, 2096 aa, synthetic construct; identical to SEQ ID NO: 2753
  source 1..2096: note = Description of Artificial Sequence: Synthetic polypeptide

SEQ ID NO: 2970 - protein, 2096 aa, synthetic construct
  source 1..2096: note = Description of Artificial Sequence: Synthetic polypeptide
MPAAKRVKLDGGDKKYSIGLDIGTNSVGWAVITDEYKVPSKKFKVLGNTDRHSIKKNLIGALLFDSGETAEATRLKRTARRRYTRRKNRICYLQEIFSNEMAKVDDSFFHRLEESFLVEEDKKHERHPIFGNIVDEVAYHEKYPTIYHLRKKLVDSTDKADLRLIYLALAHMIKFRGHFLIEGDLNPDNSDVDKLFIQLVQTYNQLFEENPINASGVDAKAILSARLSKSRRLENLIAQLPGEKKNGLFGNLIALSLGLTPNFKSNFDLAEDAKLQLSKDTYDDDLDNLLAQIGDQYADLFLAAKNLSDAILLSDILRVNTEITKAPLSASMIKRYDEHHQDLTLLKALVRQQLPEKYKEIFFDQSKNGYAGYIDGGASQEEFYKFIKPILEKMDGTEELLVKLNREDLLRKQRTFDNGSIPHQIHLGELHAILRRQEDFYPFLKDNREKIEKILTFRIPYYVGPLARGNSRFAWMTRKSEETITPWNFEEVVDKGASAQSFIERMTNFDKNLPNEKVLPKHSLLYEYFTVYNELTKVKYVTEGMRKPAFLSGEQKKAIVDLLFKTNRKVTVKQLKEDYFKKIECFDSVEISGVEDRFNASLGTYHDLLKIIKDKDFLDNEENEDILEDIVLTLTLFEDREMIEERLKTYAHLFDDKVMKQLKRRRYTGWGRLSRKLINGIRDKQSGKTILDFLKSDGFANRNFMQLIHDDSLTFKEDIQKAQVSGQGDSLHEHIANLAGSPAIKKGILQTVKVVDELVKVMGRHKPENIVIEMARENQTTQKGQKNSRERMKRIEEGIKELGSQILKEHPVENTQLQNEKLYLYYLQNGRDMYVDQELDINRLSDYDVDHIVPQSFLKDDSIDNKVLTRSDKARGKSDNVPSEEVVKKMKNYWRQLLNAKLITQRKFDNLTKAERGGLSELDKAGFIKRQLVETRQITKHVAQILDSRMNTKYDENDKLIREVKVITLKSKLVSDFRKDFQFYKVREINNYHHAHDAYLNAVVGTALIKKYPKLESEFVYGDYKVYDVRKMIAKSEQEIGKATAKYFFYSNIMNFFKTEITLANGEIRKRPLIETNGETGEIVWDKGRDFATVRKVLSMPQVNIVKKTEVQTGGFSKESILPKRNSDKLIARKKDWDPKKYGGFDSPTVAYSVLVVAKVEKGKSKKLKSVKELLGITIMERSSFEKNPIDFLEAKGYKEVKKDLIIKLPKYSLFELENGRKRMLASAGELQKGNELALPSKYVNFLYLASHYEKLKGSPEDNEQKQLFVEQHKHYLDEIIEQISEFSKRVILADANLDKVLSAYNKHRDKPIREQAENIIHLFTLTNLGAPAAFKYFDTTIDRKRYTSTKEVLDATLIHQSITGLYETRIDLSQLGGDGGPAPAPAPAPAPGGTLNIEDEHRLHETSKEPDVSLGSTWLSDFPQAWAETGGMGLAVRQAPLIIPLKATSTPVSIKQYPMSQEARLGIKPHIQRLLDQGILVPCQSPWNTPLLPVKKPGTNDYRPVQDLREVNKRVEDIHPTVPNPYNLLSGLPPSHQWYTVLDLKDAFFCLRLHPTSQPLFAFEWRDPEMGISGQLTWTRLPQGFKNSPTLFNEALHRDLADFRIQHPDLILLQYVDDLLLAATSELDCQQGTRALLQTLGNLGYRASAKKAQICQKQVKYLGYLLKEGQRWLTEARKETVMGQPTPKTPRQLREFLGTAGFCRLWIPGFAEMAAPLYPLTKPGTLFNWGPDQQKAYQEIKQALLTAPALGLPDLTKPFELFVDEKQGYAKGVLTQKLGPWRRPVAYLSKKLDPVAAGWPPCLRMVAAIAVLTKDAGKLTMGQPLVILAPHAVEALVKQPPDRWLSNARMTHYQALLLDTDRVQFGPVVALNPATLLPLPEEGLQHNCLDILAEAHGTRPDLTDQPLPDADHTWYTDGSSLLQEGQRKAGAAVTTETEVIWAKALPAGTSAQRAELIALTQALKMAEGKKLNVYTDSRYAFATAHIHGEIYRRRGWLTSEGKEIKNKDEILALLKALFLPKRLSIIHCPGHQKGHSAEARGNRMADQAARKAAITETPDTSTLLAGKRTADGSEFEKRTADGSEFESPKKKAKVE

SEQ ID NO: 2971 - protein, 2093 aa, synthetic construct; identical to SEQ ID NO: 2724
  source 1..2093: note = Description of Artificial Sequence: Synthetic polypeptide

SEQ ID NO: 2972 - protein, 2131 aa, synthetic construct; identical to SEQ ID NO: 2711
  source 1..2131: note = Description of Artificial Sequence: Synthetic polypeptide

SEQ ID NO: 2973 - protein, 2088 aa, synthetic construct
  source 1..2088: note = Description of Artificial Sequence: Synthetic polypeptide
MPAAKRVKLDGGDKKYSIGLDIGTNSVGWAVITDEYKVPSKKFKVLGNTDRHSIKKNLIGALLFDSGETAEATRLKRTARRRYTRRKNRICYLQEIFSNEMAKVDDSFFHRLEESFLVEEDKKHERHPIFGNIVDEVAYHEKYPTIYHLRKKLVDSTDKADLRLIYLALAHMIKFRGHFLIEGDLNPDNSDVDKLFIQLVQTYNQLFEENPINASGVDAKAILSARLSKSRRLENLIAQLPGEKKNGLFGNLIALSLGLTPNFKSNFDLAEDAKLQLSKDTYDDDLDNLLAQIGDQYADLFLAAKNLSDAILLSDILRVNTEITKAPLSASMIKRYDEHHQDLTLLKALVRQQLPEKYKEIFFDQSKNGYAGYIDGGASQEEFYKFIKPILEKMDGTEELLVKLNREDLLRKQRTFDNGSIPHQIHLGELHAILRRQEDFYPFLKDNREKIEKILTFRIPYYVGPLARGNSRFAWMTRKSEETITPWNFEEVVDKGASAQSFIERMTNFDKNLPNEKVLPKHSLLYEYFTVYNELTKVKYVTEGMRKPAFLSGEQKKAIVDLLFKTNRKVTVKQLKEDYFKKIECFDSVEISGVEDRFNASLGTYHDLLKIIKDKDFLDNEENEDILEDIVLTLTLFEDREMIEERLKTYAHLFDDKVMKQLKRRRYTGWGRLSRKLINGIRDKQSGKTILDFLKSDGFANRNFMQLIHDDSLTFKEDIQKAQVSGQGDSLHEHIANLAGSPAIKKGILQTVKVVDELVKVMGRHKPENIVIEMARENQTTQKGQKNSRERMKRIEEGIKELGSQILKEHPVENTQLQNEKLYLYYLQNGRDMYVDQELDINRLSDYDVDHIVPQSFLKDDSIDNKVLTRSDKARGKSDNVPSEEVVKKMKNYWRQLLNAKLITQRKFDNLTKAERGGLSELDKAGFIKRQLVETRQITKHVAQILDSRMNTKYDENDKLIREVKVITLKSKLVSDFRKDFQFYKVREINNYHHAHDAYLNAVVGTALIKKYPKLESEFVYGDYKVYDVRKMIAKSEQEIGKATAKYFFYSNIMNFFKTEITLANGEIRKRPLIETNGETGEIVWDKGRDFATVRKVLSMPQVNIVKKTEVQTGGFSKESILPKRNSDKLIARKKDWDPKKYGGFDSPTVAYSVLVVAKVEKGKSKKLKSVKELLGITIMERSSFEKNPIDFLEAKGYKEVKKDLIIKLPKYSLFELENGRKRMLASAGELQKGNELALPSKYVNFLYLASHYEKLKGSPEDNEQKQLFVEQHKHYLDEIIEQISEFSKRVILADANLDKVLSAYNKHRDKPIREQAENIIHLFTLTNLGAPAAFKYFDTTIDRKRYTSTKEVLDATLIHQSITGLYETRIDLSQLGGDGGPAPGGTLNIEDEHRLHETSKEPDVSLGSTWLSDFPQAWAETGGMGLAVRQAPLIIPLKATSTPVSIKQYPMSQEARLGIKPHIQRLLDQGILVPCQSPWNTPLLPVKKPGTNDYRPVQDLREVNKRVEDIHPTVPNPYNLLSGLPPSHQWYTVLDLKDAFFCLRLHPTSQPLFAFEWRDPEMGISGQLTWTRLPQGFKNSPTLFNEALHRDLADFRIQHPDLILLQYVDDLLLAATSELDCQQGTRALLQTLGNLGYRASAKKAQICQKQVKYLGYLLKEGQRWLTEARKETVMGQPTPKTPRQLREFLGTAGFCRLWIPGFAEMAAPLYPLTKPGTLFNWGPDQQKAYQEIKQALLTAPALGLPDLTKPFELFVDEKQGYAKGVLTQKLGPWRRPVAYLSKKLDPVAAGWPPCLRMVAAIAVLTKDAGKLTMGQPLVILAPHAVEALVKQPPDRWLSNARMTHYQALLLDTDRVQFGPVVALNPATLLPLPEEGLQHNCLDILAEAHGTRPDLTDQPLPDADHTWYTDGSSLLQEGQRKAGAAVTTETEVIWAKALPAGTSAQRAELIALTQALKMAEGKKLNVYTDSRYAFATAHIHGEIYRRRGWLTSEGKEIKNKDEILALLKALFLPKRLSIIHCPGHQKGHSAEARGNRMADQAARKAAITETPDTSTLLAGKRTADGSEFEKRTADGSEFESPKKKAKVE

SEQ ID NO: 2974 - protein, 2098 aa, synthetic construct
  source 1..2098: note = Description of Artificial Sequence: Synthetic polypeptide
MPAAKRVKLDGGDKKYSIGLDIGTNSVGWAVITDEYKVPSKKFKVLGNTDRHSIKKNLIGALLFDSGETAEATRLKRTARRRYTRRKNRICYLQEIFSNEMAKVDDSFFHRLEESFLVEEDKKHERHPIFGNIVDEVAYHEKYPTIYHLRKKLVDSTDKADLRLIYLALAHMIKFRGHFLIEGDLNPDNSDVDKLFIQLVQTYNQLFEENPINASGVDAKAILSARLSKSRRLENLIAQLPGEKKNGLFGNLIALSLGLTPNFKSNFDLAEDAKLQLSKDTYDDDLDNLLAQIGDQYADLFLAAKNLSDAILLSDILRVNTEITKAPLSASMIKRYDEHHQDLTLLKALVRQQLPEKYKEIFFDQSKNGYAGYIDGGASQEEFYKFIKPILEKMDGTEELLVKLNREDLLRKQRTFDNGSIPHQIHLGELHAILRRQEDFYPFLKDNREKIEKILTFRIPYYVGPLARGNSRFAWMTRKSEETITPWNFEEVVDKGASAQSFIERMTNFDKNLPNEKVLPKHSLLYEYFTVYNELTKVKYVTEGMRKPAFLSGEQKKAIVDLLFKTNRKVTVKQLKEDYFKKIECFDSVEISGVEDRFNASLGTYHDLLKIIKDKDFLDNEENEDILEDIVLTLTLFEDREMIEERLKTYAHLFDDKVMKQLKRRRYTGWGRLSRKLINGIRDKQSGKTILDFLKSDGFANRNFMQLIHDDSLTFKEDIQKAQVSGQGDSLHEHIANLAGSPAIKKGILQTVKVVDELVKVMGRHKPENIVIEMARENQTTQKGQKNSRERMKRIEEGIKELGSQILKEHPVENTQLQNEKLYLYYLQNGRDMYVDQELDINRLSDYDVDHIVPQSFLKDDSIDNKVLTRSDKARGKSDNVPSEEVVKKMKNYWRQLLNAKLITQRKFDNLTKAERGGLSELDKAGFIKRQLVETRQITKHVAQILDSRMNTKYDENDKLIREVKVITLKSKLVSDFRKDFQFYKVREINNYHHAHDAYLNAVVGTALIKKYPKLESEFVYGDYKVYDVRKMIAKSEQEIGKATAKYFFYSNIMNFFKTEITLANGEIRKRPLIETNGETGEIVWDKGRDFATVRKVLSMPQVNIVKKTEVQTGGFSKESILPKRNSDKLIARKKDWDPKKYGGFDSPTVAYSVLVVAKVEKGKSKKLKSVKELLGITIMERSSFEKNPIDFLEAKGYKEVKKDLIIKLPKYSLFELENGRKRMLASAGELQKGNELALPSKYVNFLYLASHYEKLKGSPEDNEQKQLFVEQHKHYLDEIIEQISEFSKRVILADANLDKVLSAYNKHRDKPIREQAENIIHLFTLTNLGAPAAFKYFDTTIDRKRYTSTKEVLDATLIHQSITGLYETRIDLSQLGGDGGPAPAPAPAPAPAPGGTLNIEDEHRLHETSKEPDVSLGSTWLSDFPQAWAETGGMGLAVRQAPLIIPLKATSTPVSIKQYPMSQEARLGIKPHIQRLLDQGILVPCQSPWNTPLLPVKKPGTNDYRPVQDLREVNKRVEDIHPTVPNPYNLLSGLPPSHQWYTVLDLKDAFFCLRLHPTSQPLFAFEWRDPEMGISGQLTWTRLPQGFKNSPTLFNEALHRDLADFRIQHPDLILLQYVDDLLLAATSELDCQQGTRALLQTLGNLGYRASAKKAQICQKQVKYLGYLLKEGQRWLTEARKETVMGQPTPKTPRQLREFLGTAGFCRLWIPGFAEMAAPLYPLTKPGTLFNWGPDQQKAYQEIKQALLTAPALGLPDLTKPFELFVDEKQGYAKGVLTQKLGPWRRPVAYLSKKLDPVAAGWPPCLRMVAAIAVLTKDAGKLTMGQPLVILAPHAVEALVKQPPDRWLSNARMTHYQALLLDTDRVQFGPVVALNPATLLPLPEEGLQHNCLDILAEAHGTRPDLTDQPLPDADHTWYTDGSSLLQEGQRKAGAAVTTETEVIWAKALPAGTSAQRAELIALTQALKMAEGKKLNVYTDSRYAFATAHIHGEIYRRRGWLTSEGKEIKNKDEILALLKALFLPKRLSIIHCPGHQKGHSAEARGNRMADQAARKAAITETPDTSTLLAGKRTADGSEFEKRTADGSEFESPKKKAKVE

SEQ ID NO: 2975 - protein, 2091 aa, synthetic construct
  source 1..2091: note = Description of Artificial Sequence: Synthetic polypeptide
MPAAKRVKLDGGDKKYSIGLDIGTNSVGWAVITDEYKVPSKKFKVLGNTDRHSIKKNLIGALLFDSGETAEATRLKRTARRRYTRRKNRICYLQEIFSNEMAKVDDSFFHRLEESFLVEEDKKHERHPIFGNIVDEVAYHEKYPTIYHLRKKLVDSTDKADLRLIYLALAHMIKFRGHFLIEGDLNPDNSDVDKLFIQLVQTYNQLFEENPINASGVDAKAILSARLSKSRRLENLIAQLPGEKKNGLFGNLIALSLGLTPNFKSNFDLAEDAKLQLSKDTYDDDLDNLLAQIGDQYADLFLAAKNLSDAILLSDILRVNTEITKAPLSASMIKRYDEHHQDLTLLKALVRQQLPEKYKEIFFDQSKNGYAGYIDGGASQEEFYKFIKPILEKMDGTEELLVKLNREDLLRKQRTFDNGSIPHQIHLGELHAILRRQEDFYPFLKDNREKIEKILTFRIPYYVGPLARGNSRFAWMTRKSEETITPWNFEEVVDKGASAQSFIERMTNFDKNLPNEKVLPKHSLLYEYFTVYNELTKVKYVTEGMRKPAFLSGEQKKAIVDLLFKTNRKVTVKQLKEDYFKKIECFDSVEISGVEDRFNASLGTYHDLLKIIKDKDFLDNEENEDILEDIVLTLTLFEDREMIEERLKTYAHLFDDKVMKQLKRRRYTGWGRLSRKLINGIRDKQSGKTILDFLKSDGFANRNFMQLIHDDSLTFKEDIQKAQVSGQGDSLHEHIANLAGSPAIKKGILQTVKVVDELVKVMGRHKPENIVIEMARENQTTQKGQKNSRERMKRIEEGIKELGSQILKEHPVENTQLQNEKLYLYYLQNGRDMYVDQELDINRLSDYDVDHIVPQSFLKDDSIDNKVLTRSDKARGKSDNVPSEEVVKKMKNYWRQLLNAKLITQRKFDNLTKAERGGLSELDKAGFIKRQLVETRQITKHVAQILDSRMNTKYDENDKLIREVKVITLKSKLVSDFRKDFQFYKVREINNYHHAHDAYLNAVVGTALIKKYPKLESEFVYGDYKVYDVRKMIAKSEQEIGKATAKYFFYSNIMNFFKTEITLANGEIRKRPLIETNGETGEIVWDKGRDFATVRKVLSMPQVNIVKKTEVQTGGFSKESILPKRNSDKLIARKKDWDPKKYGGFDSPTVAYSVLVVAKVEKGKSKKLKSVKELLGITIMERSSFEKNPIDFLEAKGYKEVKKDLIIKLPKYSLFELENGRKRMLASAGELQKGNELALPSKYVNFLYLASHYEKLKGSPEDNEQKQLFVEQHKHYLDEIIEQISEFSKRVILADANLDKVLSAYNKHRDKPIREQAENIIHLFTLTNLGAPAAFKYFDTTIDRKRYTSTKEVLDATLIHQSITGLYETRIDLSQLGGDGGGGGGGGGGTLNIEDEHRLHETSKEPDVSLGSTWLSDFPQAWAETGGMGLAVRQAPLIIPLKATSTPVSIKQYPMSQEARLGIKPHIQRLLDQGILVPCQSPWNTPLLPVKKPGTNDYRPVQDLREVNKRVEDIHPTVPNPYNLLSGLPPSHQWYTVLDLKDAFFCLRLHPTSQPLFAFEWRDPEMGISGQLTWTRLPQGFKNSPTLFNEALHRDLADFRIQHPDLILLQYVDDLLLAATSELDCQQGTRALLQTLGNLGYRASAKKAQICQKQVKYLGYLLKEGQRWLTEARKETVMGQPTPKTPRQLREFLGTAGFCRLWIPGFAEMAAPLYPLTKPGTLFNWGPDQQKAYQEIKQALLTAPALGLPDLTKPFELFVDEKQGYAKGVLTQKLGPWRRPVAYLSKKLDPVAAGWPPCLRMVAAIAVLTKDAGKLTMGQPLVILAPHAVEALVKQPPDRWLSNARMTHYQALLLDTDRVQFGPVVALNPATLLPLPEEGLQHNCLDILAEAHGTRPDLTDQPLPDADHTWYTDGSSLLQEGQRKAGAAVTTETEVIWAKALPAGTSAQRAELIALTQALKMAEGKKLNVYTDSRYAFATAHIHGEIYRRRGWLTSEGKEIKNKDEILALLKALFLPKRLSIIHCPGHQKGHSAEARGNRMADQAARKAAITETPDTSTLLAGKRTADGSEFEKRTADGSEFESPKKKAKVE

SEQ ID NO: 2976 - protein, 2096 aa, synthetic construct; identical to SEQ ID NO: 2723
  source 1..2096: note = Description of Artificial Sequence: Synthetic polypeptide

SEQ ID NO: 2977 - protein, 2096 aa, synthetic construct; identical to SEQ ID NO: 2777
  source 1..2096: note = Description of Artificial Sequence: Synthetic polypeptide

SEQ ID NO: 2978 - protein, 2093 aa, synthetic construct
  source 1..2093: note = Description of Artificial Sequence: Synthetic polypeptide
MPAAKRVKLDGGDKKYSIGLDIGTNSVGWAVITDEYKVPSKKFKVLGNTDRHSIKKNLIGALLFDSGETAEATRLKRTARRRYTRRKNRICYLQEIFSNEMAKVDDSFFHRLEESFLVEEDKKHERHPIFGNIVDEVAYHEKYPTIYHLRKKLVDSTDKADLRLIYLALAHMIKFRGHFLIEGDLNPDNSDVDKLFIQLVQTYNQLFEENPINASGVDAKAILSARLSKSRRLENLIAQLPGEKKNGLFGNLIALSLGLTPNFKSNFDLAEDAKLQLSKDTYDDDLDNLLAQIGDQYADLFLAAKNLSDAILLSDILRVNTEITKAPLSASMIKRYDEHHQDLTLLKALVRQQLPEKYKEIFFDQSKNGYAGYIDGGASQEEFYKFIKPILEKMDGTEELLVKLNREDLLRKQRTFDNGSIPHQIHLGELHAILRRQEDFYPFLKDNREKIEKILTFRIPYYVGPLARGNSRFAWMTRKSEETITPWNFEEVVDKGASAQSFIERMTNFDKNLPNEKVLPKHSLLYEYFTVYNELTKVKYVTEGMRKPAFLSGEQKKAIVDLLFKTNRKVTVKQLKEDYFKKIECFDSVEISGVEDRFNASLGTYHDLLKIIKDKDFLDNEENEDILEDIVLTLTLFEDREMIEERLKTYAHLFDDKVMKQLKRRRYTGWGRLSRKLINGIRDKQSGKTILDFLKSDGFANRNFMQLIHDDSLTFKEDIQKAQVSGQGDSLHEHIANLAGSPAIKKGILQTVKVVDELVKVMGRHKPENIVIEMARENQTTQKGQKNSRERMKRIEEGIKELGSQILKEHPVENTQLQNEKLYLYYLQNGRDMYVDQELDINRLSDYDVDHIVPQSFLKDDSIDNKVLTRSDKARGKSDNVPSEEVVKKMKNYWRQLLNAKLITQRKFDNLTKAERGGLSELDKAGFIKRQLVETRQITKHVAQILDSRMNTKYDENDKLIREVKVITLKSKLVSDFRKDFQFYKVREINNYHHAHDAYLNAVVGTALIKKYPKLESEFVYGDYKVYDVRKMIAKSEQEIGKATAKYFFYSNIMNFFKTEITLANGEIRKRPLIETNGETGEIVWDKGRDFATVRKVLSMPQVNIVKKTEVQTGGFSKESILPKRNSDKLIARKKDWDPKKYGGFDSPTVAYSVLVVAKVEKGKSKKLKSVKELLGITIMERSSFEKNPIDFLEAKGYKEVKKDLIIKLPKYSLFELENGRKRMLASAGELQKGNELALPSKYVNFLYLASHYEKLKGSPEDNEQKQLFVEQHKHYLDEIIEQISEFSKRVILADANLDKVLSAYNKHRDKPIREQAENIIHLFTLTNLGAPAAFKYFDTTIDRKRYTSTKEVLDATLIHQSITGLYETRIDLSQLGGDGGEAAAKGGGGGTLNIEDEHRLHETSKEPDVSLGSTWLSDFPQAWAETGGMGLAVRQAPLIIPLKATSTPVSIKQYPMSQEARLGIKPHIQRLLDQGILVPCQSPWNTPLLPVKKPGTNDYRPVQDLREVNKRVEDIHPTVPNPYNLLSGLPPSHQWYTVLDLKDAFFCLRLHPTSQPLFAFEWRDPEMGISGQLTWTRLPQGFKNSPTLFNEALHRDLADFRIQHPDLILLQYVDDLLLAATSELDCQQGTRALLQTLGNLGYRASAKKAQICQKQVKYLGYLLKEGQRWLTEARKETVMGQPTPKTPRQLREFLGTAGFCRLWIPGFAEMAAPLYPLTKPGTLFNWGPDQQKAYQEIKQALLTAPALGLPDLTKPFELFVDEKQGYAKGVLTQKLGPWRRPVAYLSKKLDPVAAGWPPCLRMVAAIAVLTKDAGKLTMGQPLVILAPHAVEALVKQPPDRWLSNARMTHYQALLLDTDRVQFGPVVALNPATLLPLPEEGLQHNCLDILAEAHGTRPDLTDQPLPDADHTWYTDGSSLLQEGQRKAGAAVTTETEVIWAKALPAGTSAQRAELIALTQALKMAEGKKLNVYTDSRYAFATAHIHGEIYRRRGWLTSEGKEIKNKDEILALLKALFLPKRLSIIHCPGHQKGHSAEARGNRMADQAARKAAITETPDTSTLLAGKRTADGSEFEKRTADGSEFESPKKKAKVE

SEQ ID NO: 2979 - protein, 2094 aa, synthetic construct
  source 1..2094: note = Description of Artificial Sequence: Synthetic polypeptide
MPAAKRVKLDGGDKKYSIGLDIGTNSVGWAVITDEYKVPSKKFKVLGNTDRHSIKKNLIGALLFDSGETAEATRLKRTARRRYTRRKNRICYLQEIFSNEMAKVDDSFFHRLEESFLVEEDKKHERHPIFGNIVDEVAYHEKYPTIYHLRKKLVDSTDKADLRLIYLALAHMIKFRGHFLIEGDLNPDNSDVDKLFIQLVQTYNQLFEENPINASGVDAKAILSARLSKSRRLENLIAQLPGEKKNGLFGNLIALSLGLTPNFKSNFDLAEDAKLQLSKDTYDDDLDNLLAQIGDQYADLFLAAKNLSDAILLSDILRVNTEITKAPLSASMIKRYDEHHQDLTLLKALVRQQLPEKYKEIFFDQSKNGYAGYIDGGASQEEFYKFIKPILEKMDGTEELLVKLNREDLLRKQRTFDNGSIPHQIHLGELHAILRRQEDFYPFLKDNREKIEKILTFRIPYYVGPLARGNSRFAWMTRKSEETITPWNFEEVVDKGASAQSFIERMTNFDKNLPNEKVLPKHSLLYEYFTVYNELTKVKYVTEGMRKPAFLSGEQKKAIVDLLFKTNRKVTVKQLKEDYFKKIECFDSVEISGVEDRFNASLGTYHDLLKIIKDKDFLDNEENEDILEDIVLTLTLFEDREMIEERLKTYAHLFDDKVMKQLKRRRYTGWGRLSRKLINGIRDKQSGKTILDFLKSDGFANRNFMQLIHDDSLTFKEDIQKAQVSGQGDSLHEHIANLAGSPAIKKGILQTVKVVDELVKVMGRHKPENIVIEMARENQTTQKGQKNSRERMKRIEEGIKELGSQILKEHPVENTQLQNEKLYLYYLQNGRDMYVDQELDINRLSDYDVDHIVPQSFLKDDSIDNKVLTRSDKARGKSDNVPSEEVVKKMKNYWRQLLNAKLITQRKFDNLTKAERGGLSELDKAGFIKRQLVETRQITKHVAQILDSRMNTKYDENDKLIREVKVITLKSKLVSDFRKDFQFYKVREINNYHHAHDAYLNAVVGTALIKKYPKLESEFVYGDYKVYDVRKMIAKSEQEIGKATAKYFFYSNIMNFFKTEITLANGEIRKRPLIETNGETGEIVWDKGRDFATVRKVLSMPQVNIVKKTEVQTGGFSKESILPKRNSDKLIARKKDWDPKKYGGFDSPTVAYSVLVVAKVEKGKSKKLKSVKELLGITIMERSSFEKNPIDFLEAKGYKEVKKDLIIKLPKYSLFELENGRKRMLASAGELQKGNELALPSKYVNFLYLASHYEKLKGSPEDNEQKQLFVEQHKHYLDEIIEQISEFSKRVILADANLDKVLSAYNKHRDKPIREQAENIIHLFTLTNLGAPAAFKYFDTTIDRKRYTSTKEVLDATLIHQSITGLYETRIDLSQLGGDGGGGSGSSGGGGGTLNIEDEHRLHETSKEPDVSLGSTWLSDFPQAWAETGGMGLAVRQAPLIIPLKATSTPVSIKQYPMSQEARLGIKPHIQRLLDQGILVPCQSPWNTPLLPVKKPGTNDYRPVQDLREVNKRVEDIHPTVPNPYNLLSGLPPSHQWYTVLDLKDAFFCLRLHPTSQPLFAFEWRDPEMGISGQLTWTRLPQGFKNSPTLFNEALHRDLADFRIQHPDLILLQYVDDLLLAATSELDCQQGTRALLQTLGNLGYRASAKKAQICQKQVKYLGYLLKEGQRWLTEARKETVMGQPTPKTPRQLREFLGTAGFCRLWIPGFAEMAAPLYPLTKPGTLFNWGPDQQKAYQEIKQALLTAPALGLPDLTKPFELFVDEKQGYAKGVLTQKLGPWRRPVAYLSKKLDPVAAGWPPCLRMVAAIAVLTKDAGKLTMGQPLVILAPHAVEALVKQPPDRWLSNARMTHYQALLLDTDRVQFGPVVALNPATLLPLPEEGLQHNCLDILAEAHGTRPDLTDQPLPDADHTWYTDGSSLLQEGQRKAGAAVTTETEVIWAKALPAGTSAQRAELIALTQALKMAEGKKLNVYTDSRYAFATAHIHGEIYRRRGWLTSEGKEIKNKDEILALLKALFLPKRLSIIHCPGHQKGHSAEARGNRMADQAARKAAITETPDTSTLLAGKRTADGSEFEKRTADGSEFESPKKKAKVE

SEQ ID NO: 2980 - protein, 2092 aa, synthetic construct
  source 1..2092: note = Description of Artificial Sequence: Synthetic polypeptide
MPAAKRVKLDGGDKKYSIGLDIGTNSVGWAVITDEYKVPSKKFKVLGNTDRHSIKKNLIGALLFDSGETAEATRLKRTARRRYTRRKNRICYLQEIFSNEMAKVDDSFFHRLEESFLVEEDKKHERHPIFGNIVDEVAYHEKYPTIYHLRKKLVDSTDKADLRLIYLALAHMIKFRGHFLIEGDLNPDNSDVDKLFIQLVQTYNQLFEENPINASGVDAKAILSARLSKSRRLENLIAQLPGEKKNGLFGNLIALSLGLTPNFKSNFDLAEDAKLQLSKDTYDDDLDNLLAQIGDQYADLFLAAKNLSDAILLSDILRVNTEITKAPLSASMIKRYDEHHQDLTLLKALVRQQLPEKYKEIFFDQSKNGYAGYIDGGASQEEFYKFIKPILEKMDGTEELLVKLNREDLLRKQRTFDNGSIPHQIHLGELHAILRRQEDFYPFLKDNREKIEKILTFRIPYYVGPLARGNSRFAWMTRKSEETITPWNFEEVVDKGASAQSFIERMTNFDKNLPNEKVLPKHSLLYEYFTVYNELTKVKYVTEGMRKPAFLSGEQKKAIVDLLFKTNRKVTVKQLKEDYFKKIECFDSVEISGVEDRFNASLGTYHDLLKIIKDKDFLDNEENEDILEDIVLTLTLFEDREMIEERLKTYAHLFDDKVMKQLKRRRYTGWGRLSRKLINGIRDKQSGKTILDFLKSDGFANRNFMQLIHDDSLTFKEDIQKAQVSGQGDSLHEHIANLAGSPAIKKGILQTVKVVDELVKVMGRHKPENIVIEMARENQTTQKGQKNSRERMKRIEEGIKELGSQILKEHPVENTQLQNEKLYLYYLQNGRDMYVDQELDINRLSDYDVDHIVPQSFLKDDSIDNKVLTRSDKARGKSDNVPSEEVVKKMKNYWRQLLNAKLITQRKFDNLTKAERGGLSELDKAGFIKRQLVETRQITKHVAQILDSRMNTKYDENDKLIREVKVITLKSKLVSDFRKDFQFYKVREINNYHHAHDAYLNAVVGTALIKKYPKLESEFVYGDYKVYDVRKMIAKSEQEIGKATAKYFFYSNIMNFFKTEITLANGEIRKRPLIETNGETGEIVWDKGRDFATVRKVLSMPQVNIVKKTEVQTGGFSKESILPKRNSDKLIARKKDWDPKKYGGFDSPTVAYSVLVVAKVEKGKSKKLKSVKELLGITIMERSSFEKNPIDFLEAKGYKEVKKDLIIKLPKYSLFELENGRKRMLASAGELQKGNELALPSKYVNFLYLASHYEKLKGSPEDNEQKQLFVEQHKHYLDEIIEQISEFSKRVILADANLDKVLSAYNKHRDKPIREQAENIIHLFTLTNLGAPAAFKYFDTTIDRKRYTSTKEVLDATLIHQSITGLYETRIDLSQLGGDGGPAPAPAPGGTLNIEDEHRLHETSKEPDVSLGSTWLSDFPQAWAETGGMGLAVRQAPLIIPLKATSTPVSIKQYPMSQEARLGIKPHIQRLLDQGILVPCQSPWNTPLLPVKKPGTNDYRPVQDLREVNKRVEDIHPTVPNPYNLLSGLPPSHQWYTVLDLKDAFFCLRLHPTSQPLFAFEWRDPEMGISGQLTWTRLPQGFKNSPTLFNEALHRDLADFRIQHPDLILLQYVDDLLLAATSELDCQQGTRALLQTLGNLGYRASAKKAQICQKQVKYLGYLLKEGQRWLTEARKETVMGQPTPKTPRQLREFLGTAGFCRLWIPGFAEMAAPLYPLTKPGTLFNWGPDQQKAYQEIKQALLTAPALGLPDLTKPFELFVDEKQGYAKGVLTQKLGPWRRPVAYLSKKLDPVAAGWPPCLRMVAAIAVLTKDAGKLTMGQPLVILAPHAVEALVKQPPDRWLSNARMTHYQALLLDTDRVQFGPVVALNPATLLPLPEEGLQHNCLDILAEAHGTRPDLTDQPLPDADHTWYTDGSSLLQEGQRKAGAAVTTETEVIWAKALPAGTSAQRAELIALTQALKMAEGKKLNVYTDSRYAFATAHIHGEIYRRRGWLTSEGKEIKNKDEILALLKALFLPKRLSIIHCPGHQKGHSAEARGNRMADQAARKAAITETPDTSTLLAGKRTADGSEFEKRTADGSEFESPKKKAKVE

SEQ ID NO: 2981 - protein, 2100 aa, synthetic construct
  source 1..2100: note = Description of Artificial Sequence: Synthetic polypeptide
MPAAKRVKLDGGDKKYSIGLDIGTNSVGWAVITDEYKVPSKKFKVLGNTDRHSIKKNLIGALLFDSGETAEATRLKRTARRRYTRRKNRICYLQEIFSNEMAKVDDSFFHRLEESFLVEEDKKHERHPIFGNIVDEVAYHEKYPTIYHLRKKLVDSTDKADLRLIYLALAHMIKFRGHFLIEGDLNPDNSDVDKLFIQLVQTYNQLFEENPINASGVDAKAILSARLSKSRRLENLIAQLPGEKKNGLFGNLIALSLGLTPNFKSNFDLAEDAKLQLSKDTYDDDLDNLLAQIGDQYADLFLAAKNLSDAILLSDILRVNTEITKAPLSASMIKRYDEHHQDLTLLKALVRQQLPEKYKEIFFDQSKNGYAGYIDGGASQEEFYKFIKPILEKMDGTEELLVKLNREDLLRKQRTFDNGSIPHQIHLGELHAILRRQEDFYPFLKDNREKIEKILTFRIPYYVGPLARGNSRFAWMTRKSEETITPWNFEEVVDKGASAQSFIERMTNFDKNLPNEKVLPKHSLLYEYFTVYNELTKVKYVTEGMRKPAFLSGEQKKAIVDLLFKTNRKVTVKQLKEDYFKKIECFDSVEISGVEDRFNASLGTYHDLLKIIKDKDFLDNEENEDILEDIVLTLTLFEDREMIEERLKTYAHLFDDKVMKQLKRRRYTGWGRLSRKLINGIRDKQSGKTILDFLKSDGFANRNFMQLIHDDSLTFKEDIQKAQVSGQGDSLHEHIANLAGSPAIKKGILQTVKVVDELVKVMGRHKPENIVIEMARENQTTQKGQKNSRERMKRIEEGIKELGSQILKEHPVENTQLQNEKLYLYYLQNGRDMYVDQELDINRLSDYDVDHIVPQSFLKDDSIDNKVLTRSDKARGKSDNVPSEEVVKKMKNYWRQLLNAKLITQRKFDNLTKAERGGLSELDKAGFIKRQLVETRQITKHVAQILDSRMNTKYDENDKLIREVKVITLKSKLVSDFRKDFQFYKVREINNYHHAHDAYLNAVVGTALIKKYPKLESEFVYGDYKVYDVRKMIAKSEQEIGKATAKYFFYSNIMNFFKTEITLANGEIRKRPLIETNGETGEIVWDKGRDFATVRKVLSMPQVNIVKKTEVQTGGFSKESILPKRNSDKLIARKKDWDPKKYGGFDSPTVAYSVLVVAKVEKGKSKKLKSVKELLGITIMERSSFEKNPIDFLEAKGYKEVKKDLIIKLPKYSLFELENGRKRMLASAGELQKGNELALPSKYVNFLYLASHYEKLKGSPEDNEQKQLFVEQHKHYLDEIIEQISEFSKRVILADANLDKVLSAYNKHRDKPIREQAENIIHLFTLTNLGAPAAFKYFDTTIDRKRYTSTKEVLDATLIHQSITGLYETRIDLSQLGGDGGGGSGGSGGSGGSGGSGGTLNIEDEHRLHETSKEPDVSLGSTWLSDFPQAWAETGGMGLAVRQAPLIIPLKATSTPVSIKQYPMSQEARLGIKPHIQRLLDQGILVPCQSPWNTPLLPVKKPGTNDYRPVQDLREVNKRVEDIHPTVPNPYNLLSGLPPSHQWYTVLDLKDAFFCLRLHPTSQPLFAFEWRDPEMGISGQLTWTRLPQGFKNSPTLFNEALHRDLADFRIQHPDLILLQYVDDLLLAATSELDCQQGTRALLQTLGNLGYRASAKKAQICQKQVKYLGYLLKEGQRWLTEARKETVMGQPTPKTPRQLREFLGTAGFCRLWIPGFAEMAAPLYPLTKPGTLFNWGPDQQKAYQEIKQALLTAPALGLPDLTKPFELFVDEKQGYAKGVLTQKLGPWRRPVAYLSKKLDPVAAGWPPCLRMVAAIAVLTKDAGKLTMGQPLVILAPHAVEALVKQPPDRWLSNARMTHYQALLLDTDRVQFGPVVALNPATLLPLPEEGLQHNCLDILAEAHGTRPDLTDQPLPDADHTWYTDGSSLLQEGQRKAGAAVTTETEVIWAKALPAGTSAQRAELIALTQALKMAEGKKLNVYTDSRYAFATAHIHGEIYRRRGWLTSEGKEIKNKDEILALLKALFLPKRLSIIHCPGHQKGHSAEARGNRMADQAARKAAITETPDTSTLLAGKRTADGSEFEKRTADGSEFESPKKKAKVE

SEQ ID NO: 2982 - protein, 2093 aa, synthetic construct; identical to SEQ ID NO: 2726
  source 1..2093: note = Description of Artificial Sequence: Synthetic polypeptide

SEQ ID NO: 2983 - protein, 2115 aa, synthetic construct; identical to SEQ ID NO: 2741
  source 1..2115: note = Description of Artificial Sequence: Synthetic polypeptide

SEQ ID NO: 2984 - protein, 2090 aa, synthetic construct
  source 1..2090: note = Description of Artificial Sequence: Synthetic polypeptide
MPAAKRVKLDGGDKKYSIGLDIGTNSVGWAVITDEYKVPSKKFKVLGNTDRHSIKKNLIGALLFDSGETAEATRLKRTARRRYTRRKNRICYLQEIFSNEMAKVDDSFFHRLEESFLVEEDKKHERHPIFGNIVDEVAYHEKYPTIYHLRKKLVDSTDKADLRLIYLALAHMIKFRGHFLIEGDLNPDNSDVDKLFIQLVQTYNQLFEENPINASGVDAKAILSARLSKSRRLENLIAQLPGEKKNGLFGNLIALSLGLTPNFKSNFDLAEDAKLQLSKDTYDDDLDNLLAQIGDQYADLFLAAKNLSDAILLSDILRVNTEITKAPLSASMIKRYDEHHQDLTLLKALVRQQLPEKYKEIFFDQSKNGYAGYIDGGASQEEFYKFIKPILEKMDGTEELLVKLNREDLLRKQRTFDNGSIPHQIHLGELHAILRRQEDFYPFLKDNREKIEKILTFRIPYYVGPLARGNSRFAWMTRKSEETITPWNFEEVVDKGASAQSFIERMTNFDKNLPNEKVLPKHSLLYEYFTVYNELTKVKYVTEGMRKPAFLSGEQKKAIVDLLFKTNRKVTVKQLKEDYFKKIECFDSVEISGVEDRFNASLGTYHDLLKIIKDKDFLDNEENEDILEDIVLTLTLFEDREMIEERLKTYAHLFDDKVMKQLKRRRYTGWGRLSRKLINGIRDKQSGKTILDFLKSDGFANRNFMQLIHDDSLTFKEDIQKAQVSGQGDSLHEHIANLAGSPAIKKGILQTVKVVDELVKVMGRHKPENIVIEMARENQTTQKGQKNSRERMKRIEEGIKELGSQILKEHPVENTQLQNEKLYLYYLQNGRDMYVDQELDINRLSDYDVDHIVPQSFLKDDSIDNKVLTRSDKARGKSDNVPSEEVVKKMKNYWRQLLNAKLITQRKFDNLTKAERGGLSELDKAGFIKRQLVETRQITKHVAQILDSRMNTKYDENDKLIREVKVITLKSKLVSDFRKDFQFYKVREINNYHHAHDAYLNAVVGTALIKKYPKLESEFVYGDYKVYDVRKMIAKSEQEIGKATAKYFFYSNIMNFFKTEITLANGEIRKRPLIETNGETGEIVWDKGRDFATVRKVLSMPQVNIVKKTEVQTGGFSKESILPKRNSDKLIARKKDWDPKKYGGFDSPTVAYSVLVVAKVEKGKSKKLKSVKELLGITIMERSSFEKNPIDFLEAKGYKEVKKDLIIKLPKYSLFELENGRKRMLASAGELQKGNELALPSKYVNFLYLASHYEKLKGSPEDNEQKQLFVEQHKHYLDEIIEQISEFSKRVILADANLDKVLSAYNKHRDKPIREQAENIIHLFTLTNLGAPAAFKYFDTTIDRKRYTSTKEVLDATLIHQSITGLYETRIDLSQLGGDGGGGGGGGGTLNIEDEHRLHETSKEPDVSLGSTWLSDFPQAWAETGGMGLAVRQAPLIIPLKATSTPVSIKQYPMSQEARLGIKPHIQRLLDQGILVPCQSPWNTPLLPVKKPGTNDYRPVQDLREVNKRVEDIHPTVPNPYNLLSGLPPSHQWYTVLDLKDAFFCLRLHPTSQPLFAFEWRDPEMGISGQLTWTRLPQGFKNSPTLFNEALHRDLADFRIQHPDLILLQYVDDLLLAATSELDCQQGTRALLQTLGNLGYRASAKKAQICQKQVKYLGYLLKEGQRWLTEARKETVMGQPTPKTPRQLREFLGTAGFCRLWIPGFAEMAAPLYPLTKPGTLFNWGPDQQKAYQEIKQALLTAPALGLPDLTKPFELFVDEKQGYAKGVLTQKLGPWRRPVAYLSKKLDPVAAGWPPCLRMVAAIAVLTKDAGKLTMGQPLVILAPHAVEALVKQPPDRWLSNARMTHYQALLLDTDRVQFGPVVALNPATLLPLPEEGLQHNCLDILAEAHGTRPDLTDQPLPDADHTWYTDGSSLLQEGQRKAGAAVTTETEVIWAKALPAGTSAQRAELIALTQALKMAEGKKLNVYTDSRYAFATAHIHGEIYRRRGWLTSEGKEIKNKDEILALLKALFLPKRLSIIHCPGHQKGHSAEARGNRMADQAARKAAITETPDTSTLLAGKRTADGSEFEKRTADGSEFESPKKKAKVE

SEQ ID NO: 2985 - protein, 2094 aa, synthetic construct
  source 1..2094: note = Description of Artificial Sequence: Synthetic polypeptide
MPAAKRVKLDGGDKKYSIGLDIGTNSVGWAVITDEYKVPSKKFKVLGNTDRHSIKKNLIGALLFDSGETAEATRLKRTARRRYTRRKNRICYLQEIFSNEMAKVDDSFFHRLEESFLVEEDKKHERHPIFGNIVDEVAYHEKYPTIYHLRKKLVDSTDKADLRLIYLALAHMIKFRGHFLIEGDLNPDNSDVDKLFIQLVQTYNQLFEENPINASGVDAKAILSARLSKSRRLENLIAQLPGEKKNGLFGNLIALSLGLTPNFKSNFDLAEDAKLQLSKDTYDDDLDNLLAQIGDQYADLFLAAKNLSDAILLSDILRVNTEITKAPLSASMIKRYDEHHQDLTLLKALVRQQLPEKYKEIFFDQSKNGYAGYIDGGASQEEFYKFIKPILEKMDGTEELLVKLNREDLLRKQRTFDNGSIPHQIHLGELHAILRRQEDFYPFLKDNREKIEKILTFRIPYYVGPLARGNSRFAWMTRKSEETITPWNFEEVVDKGASAQSFIERMTNFDKNLPNEKVLPKHSLLYEYFTVYNELTKVKYVTEGMRKPAFLSGEQKKAIVDLLFKTNRKVTVKQLKEDYFKKIECFDSVEISGVEDRFNASLGTYHDLLKIIKDKDFLDNEENEDILEDIVLTLTLFEDREMIEERLKTYAHLFDDKVMKQLKRRRYTGWGRLSRKLINGIRDKQSGKTILDFLKSDGFANRNFMQLIHDDSLTFKEDIQKAQVSGQGDSLHEHIANLAGSPAIKKGILQTVKVVDELVKVMGRHKPENIVIEMARENQTTQKGQKNSRERMKRIEEGIKELGSQILKEHPVENTQLQNEKLYLYYLQNGRDMYVDQELDINRLSDYDVDHIVPQSFLKDDSIDNKVLTRSDKARGKSDNVPSEEVVKKMKNYWRQLLNAKLITQRKFDNLTKAERGGLSELDKAGFIKRQLVETRQITKHVAQILDSRMNTKYDENDKLIREVKVITLKSKLVSDFRKDFQFYKVREINNYHHAHDAYLNAVVGTALIKKYPKLESEFVYGDYKVYDVRKMIAKSEQEIGKATAKYFFYSNIMNFFKTEITLANGEIRKRPLIETNGETGEIVWDKGRDFATVRKVLSMPQVNIVKKTEVQTGGFSKESILPKRNSDKLIARKKDWDPKKYGGFDSPTVAYSVLVVAKVEKGKSKKLKSVKELLGITIMERSSFEKNPIDFLEAKGYKEVKKDLIIKLPKYSLFELENGRKRMLASAGELQKGNELALPSKYVNFLYLASHYEKLKGSPEDNEQKQLFVEQHKHYLDEIIEQISEFSKRVILADANLDKVLSAYNKHRDKPIREQAENIIHLFTLTNLGAPAAFKYFDTTIDRKRYTSTKEVLDATLIHQSITGLYETRIDLSQLGGDGGGGSGSSPAPGGTLNIEDEHRLHETSKEPDVSLGSTWLSDFPQAWAETGGMGLAVRQAPLIIPLKATSTPVSIKQYPMSQEARLGIKPHIQRLLDQGILVPCQSPWNTPLLPVKKPGTNDYRPVQDLREVNKRVEDIHPTVPNPYNLLSGLPPSHQWYTVLDLKDAFFCLRLHPTSQPLFAFEWRDPEMGISGQLTWTRLPQGFKNSPTLFNEALHRDLADFRIQHPDLILLQYVDDLLLAATSELDCQQGTRALLQTLGNLGYRASAKKAQICQKQVKYLGYLLKEGQRWLTEARKETVMGQPTPKTPRQLREFLGTAGFCRLWIPGFAEMAAPLYPLTKPGTLFNWGPDQQKAYQEIKQALLTAPALGLPDLTKPFELFVDEKQGYAKGVLTQKLGPWRRPVAYLSKKLDPVAAGWPPCLRMVAAIAVLTKDAGKLTMGQPLVILAPHAVEALVKQPPDRWLSNARMTHYQALLLDTDRVQFGPVVALNPATLLPLPEEGLQHNCLDILAEAHGTRPDLTDQPLPDADHTWYTDGSSLLQEGQRKAGAAVTTETEVIWAKALPAGTSAQRAELIALTQALKMAEGKKLNVYTDSRYAFATAHIHGEIYRRRGWLTSEGKEIKNKDEILALLKALFLPKRLSIIHCPGHQKGHSAEARGNRMADQAARKAAITETPDTSTLLAGKRTADGSEFEKRTADGSEFESPKKKAKVE

SEQ ID NO: 2986 - protein, 2088 aa, synthetic construct
  source 1..2088: note = Description of Artificial Sequence: Synthetic polypeptide
MPAAKRVKLDGGDKKYSIGLDIGTNSVGWAVITDEYKVPSKKFKVLGNTDRHSIKKNLIGALLFDSGETAEATRLKRTARRRYTRRKNRICYLQEIFSNEMAKVDDSFFHRLEESFLVEEDKKHERHPIFGNIVDEVAYHEKYPTIYHLRKKLVDSTDKADLRLIYLALAHMIKFRGHFLIEGDLNPDNSDVDKLFIQLVQTYNQLFEENPINASGVDAKAILSARLSKSRRLENLIAQLPGEKKNGLFGNLIALSLGLTPNFKSNFDLAEDAKLQLSKDTYDDDLDNLLAQIGDQYADLFLAAKNLSDAILLSDILRVNTEITKAPLSASMIKRYDEHHQDLTLLKALVRQQLPEKYKEIFFDQSKNGYAGYIDGGASQEEFYKFIKPILEKMDGTEELLVKLNREDLLRKQRTFDNGSIPHQIHLGELHAILRRQEDFYPFLKDNREKIEKILTFRIPYYVGPLARGNSRFAWMTRKSEETITPWNFEEVVDKGASAQSFIERMTNFDKNLPNEKVLPKHSLLYEYFTVYNELTKVKYVTEGMRKPAFLSGEQKKAIVDLLFKTNRKVTVKQLKEDYFKKIECFDSVEISGVEDRFNASLGTYHDLLKIIKDKDFLDNEENEDILEDIVLTLTLFEDREMIEERLKTYAHLFDDKVMKQLKRRRYTGWGRLSRKLINGIRDKQSGKTILDFLKSDGFANRNFMQLIHDDSLTFKEDIQKAQVSGQGDSLHEHIANLAGSPAIKKGILQTVKVVDELVKVMGRHKPENIVIEMARENQTTQKGQKNSRERMKRIEEGIKELGSQILKEHPVENTQLQNEKLYLYYLQNGRDMYVDQELDINRLSDYDVDHIVPQSFLKDDSIDNKVLTRSDKARGKSDNVPSEEVVKKMKNYWRQLLNAKLITQRKFDNLTKAERGGLSELDKAGFIKRQLVETRQITKHVAQILDSRMNTKYDENDKLIREVKVITLKSKLVSDFRKDFQFYKVREINNYHHAHDAYLNAVVGTALIKKYPKLESEFVYGDYKVYDVRKMIAKSEQEIGKATAKYFFYSNIMNFFKTEITLANGEIRKRPLIETNGETGEIVWDKGRDFATVRKVLSMPQVNIVKKTEVQTGGFSKESILPKRNSDKLIARKKDWDPKKYGGFDSPTVAYSVLVVAKVEKGKSKKLKSVKELLGITIMERSSFEKNPIDFLEAKGYKEVKKDLIIKLPKYSLFELENGRKRMLASAGELQKGNELALPSKYVNFLYLASHYEKLKGSPEDNEQKQLFVEQHKHYLDEIIEQISEFSKRVILADANLDKVLSAYNKHRDKPIREQAENIIHLFTLTNLGAPAAFKYFDTTIDRKRYTSTKEVLDATLIHQSITGLYETRIDLSQLGGDGGGSSGGTLNIEDEHRLHETSKEPDVSLGSTWLSDFPQAWAETGGMGLAVRQAPLIIPLKATSTPVSIKQYPMSQEARLGIKPHIQRLLDQGILVPCQSPWNTPLLPVKKPGTNDYRPVQDLREVNKRVEDIHPTVPNPYNLLSGLPPSHQWYTVLDLKDAFFCLRLHPTSQPLFAFEWRDPEMGISGQLTWTRLPQGFKNSPTLFNEALHRDLADFRIQHPDLILLQYVDDLLLAATSELDCQQGTRALLQTLGNLGYRASAKKAQICQKQVKYLGYLLKEGQRWLTEARKETVMGQPTPKTPRQLREFLGTAGFCRLWIPGFAEMAAPLYPLTKPGTLFNWGPDQQKAYQEIKQALLTAPALGLPDLTKPFELFVDEKQGYAKGVLTQKLGPWRRPVAYLSKKLDPVAAGWPPCLRMVAAIAVLTKDAGKLTMGQPLVILAPHAVEALVKQPPDRWLSNARMTHYQALLLDTDRVQFGPVVALNPATLLPLPEEGLQHNCLDILAEAHGTRPDLTDQPLPDADHTWYTDGSSLLQEGQRKAGAAVTTETEVIWAKALPAGTSAQRAELIALTQALKMAEGKKLNVYTDSRYAFATAHIHGEIYRRRGWLTSEGKEIKNKDEILALLKALFLPKRLSIIHCPGHQKGHSAEARGNRMADQAARKAAITETPDTSTLLAGKRTADGSEFEKRTADGSEFESPKKKAKVE

SEQ ID NO: 2987 - protein, 2096 aa, synthetic construct; identical to SEQ ID NO: 2776
  source 1..2096: note = Description of Artificial Sequence: Synthetic polypeptide

SEQ ID NO: 2988 - protein, 2094 aa, synthetic construct
  source 1..2094: note = Description of Artificial Sequence: Synthetic polypeptide
MPAAKRVKLDGGDKKYSIGLDIGTNSVGWAVITDEYKVPSKKFKVLGNTDRHSIKKNLIGALLFDSGETAEATRLKRTARRRYTRRKNRICYLQEIFSNEMAKVDDSFFHRLEESFLVEEDKKHERHPIFGNIVDEVAYHEKYPTIYHLRKKLVDSTDKADLRLIYLALAHMIKFRGHFLIEGDLNPDNSDVDKLFIQLVQTYNQLFEENPINASGVDAKAILSARLSKSRRLENLIAQLPGEKKNGLFGNLIALSLGLTPNFKSNFDLAEDAKLQLSKDTYDDDLDNLLAQIGDQYADLFLAAKNLSDAILLSDILRVNTEITKAPLSASMIKRYDEHHQDLTLLKALVRQQLPEKYKEIFFDQSKNGYAGYIDGGASQEEFYKFIKPILEKMDGTEELLVKLNREDLLRKQRTFDNGSIPHQIHLGELHAILRRQEDFYPFLKDNREKIEKILTFRIPYYVGPLARGNSRFAWMTRKSEETITPWNFEEVVDKGASAQSFIERMTNFDKNLPNEKVLPKHSLLYEYFTVYNELTKVKYVTEGMRKPAFLSGEQKKAIVDLLFKTNRKVTVKQLKEDYFKKIECFDSVEISGVEDRFNASLGTYHDLLKIIKDKDFLDNEENEDILEDIVLTLTLFEDREMIEERLKTYAHLFDDKVMKQLKRRRYTGWGRLSRKLINGIRDKQSGKTILDFLKSDGFANRNFMQLIHDDSLTFKEDIQKAQVSGQGDSLHEHIANLAGSPAIKKGILQTVKVVDELVKVMGRHKPENIVIEMARENQTTQKGQKNSRERMKRIEEGIKELGSQILKEHPVENTQLQNEKLYLYYLQNGRDMYVDQELDINRLSDYDVDHIVPQSFLKDDSIDNKVLTRSDKARGKSDNVPSEEVVKKMKNYWRQLLNAKLITQRKFDNLTKAERGGLSELDKAGFIKRQLVETRQITKHVAQILDSRMNTKYDENDKLIREVKVITLKSKLVSDFRKDFQFYKVREINNYHHAHDAYLNAVVGTALIKKYPKLESEFVYGDYKVYDVRKMIAKSEQEIGKATAKYFFYSNIMNFFKTEITLANGEIRKRPLIETNGETGEIVWDKGRDFATVRKVLSMPQVNIVKKTEVQTGGFSKESILPKRNSDKLIARKKDWDPKKYGGFDSPTVAYSVLVVAKVEKGKSKKLKSVKELLGITIMERSSFEKNPIDFLEAKGYKEVKKDLIIKLPKYSLFELENGRKRMLASAGELQKGNELALPSKYVNFLYLASHYEKLKGSPEDNEQKQLFVEQHKHYLDEIIEQISEFSKRVILADANLDKVLSAYNKHRDKPIREQAENIIHLFTLTNLGAPAAFKYFDTTIDRKRYTSTKEVLDATLIHQSITGLYETRIDLSQLGGDGGGSSPAPGGGGGTLNIEDEHRLHETSKEPDVSLGSTWLSDFPQAWAETGGMGLAVRQAPLIIPLKATSTPVSIKQYPMSQEARLGIKPHIQRLLDQGILVPCQSPWNTPLLPVKKPGTNDYRPVQDLREVNKRVEDIHPTVPNPYNLLSGLPPSHQWYTVLDLKDAFFCLRLHPTSQPLFAFEWRDPEMGISGQLTWTRLPQGFKNSPTLFNEALHRDLADFRIQHPDLILLQYVDDLLLAATSELDCQQGTRALLQTLGNLGYRASAKKAQICQKQVKYLGYLLKEGQRWLTEARKETVMGQPTPKTPRQLREFLGTAGFCRLWIPGFAEMAAPLYPLTKPGTLFNWGPDQQKAYQEIKQALLTAPALGLPDLTKPFELFVDEKQGYAKGVLTQKLGPWRRPVAYLSKKLDPVAAGWPPCLRMVAAIAVLTKDAGKLTMGQPLVILAPHAVEALVKQPPDRWLSNARMTHYQALLLDTDRVQFGPVVALNPATLLPLPEEGLQHNCLDILAEAHGTRPDLTDQPLPDADHTWYTDGSSLLQEGQRKAGAAVTTETEVIWAKALPAGTSAQRAELIALTQALKMAEGKKLNVYTDSRYAFATAHIHGEIYRRRGWLTSEGKEIKNKDEILALLKALFLPKRLSIIHCPGHQKGHSAEARGNRMADQAARKAAITETPDTSTLLAGKRTADGSEFEKRTADGSEFESPKKKAKVE

SEQ ID NO: 2989 - protein, 2096 aa, synthetic construct; identical to SEQ ID NO: 2727
  source 1..2096: note = Description of Artificial Sequence: Synthetic polypeptide

SEQ ID NO: 2990 - protein, 2096 aa, synthetic construct; identical to SEQ ID NO: 2764
  source 1..2096: note = Description of Artificial Sequence: Synthetic polypeptide

SEQ ID NO: 2991 - protein, 2110 aa, synthetic construct; identical to SEQ ID NO: 2716
  source 1..2110: note = Description of Artificial Sequence: Synthetic polypeptide

SEQ ID NO: 2992 - protein, 2115 aa, synthetic construct
  source 1..2115: note = Description of Artificial Sequence: Synthetic polypeptide
MPAAKRVKLDGGDKKYSIGLDIGTNSVGWAVITDEYKVPSKKFKVLGNTDRHSIKKNLIGALLFDSGETAEATRLKRTARRRYTRRKNRICYLQEIFSNEMAKVDDSFFHRLEESFLVEEDKKHERHPIFGNIVDEVAYHEKYPTIYHLRKKLVDSTDKADLRLIYLALAHMIKFRGHFLIEGDLNPDNSDVDKLFIQLVQTYNQLFEENPINASGVDAKAILSARLSKSRRLENLIAQLPGEKKNGLFGNLIALSLGLTPNFKSNFDLAEDAKLQLSKDTYDDDLDNLLAQIGDQYADLFLAAKNLSDAILLSDILRVNTEITKAPLSASMIKRYDEHHQDLTLLKALVRQQLPEKYKEIFFDQSKNGYAGYIDGGASQEEFYKFIKPILEKMDGTEELLVKLNREDLLRKQRTFDNGSIPHQIHLGELHAILRRQEDFYPFLKDNREKIEKILTFRIPYYVGPLARGNSRFAWMTRKSEETITPWNFEEVVDKGASAQSFIERMTNFDKNLPNEKVLPKHSLLYEYFTVYNELTKVKYVTEGMRKPAFLSGEQKKAIVDLLFKTNRKVTVKQLKEDYFKKIECFDSVEISGVEDRFNASLGTYHDLLKIIKDKDFLDNEENEDILEDIVLTLTLFEDREMIEERLKTYAHLFDDKVMKQLKRRRYTGWGRLSRKLINGIRDKQSGKTILDFLKSDGFANRNFMQLIHDDSLTFKEDIQKAQVSGQGDSLHEHIANLAGSPAIKKGILQTVKVVDELVKVMGRHKPENIVIEMARENQTTQKGQKNSRERMKRIEEGIKELGSQILKEHPVENTQLQNEKLYLYYLQNGRDMYVDQELDINRLSDYDVDHIVPQSFLKDDSIDNKVLTRSDKARGKSDNVPSEEVVKKMKNYWRQLLNAKLITQRKFDNLTKAERGGLSELDKAGFIKRQLVETRQITKHVAQILDSRMNTKYDENDKLIREVKVITLKSKLVSDFRKDFQFYKVREINNYHHAHDAYLNAVVGTALIKKYPKLESEFVYGDYKVYDVRKMIAKSEQEIGKATAKYFFYSNIMNFFKTEITLANGEIRKRPLIETNGETGEIVWDKGRDFATVRKVLSMPQVNIVKKTEVQTGGFSKESILPKRNSDKLIARKKDWDPKKYGGFDSPTVAYSVLVVAKVEKGKSKKLKSVKELLGITIMERSSFEKNPIDFLEAKGYKEVKKDLIIKLPKYSLFELENGRKRMLASAGELQKGNELALPSKYVNFLYLASHYEKLKGSPEDNEQKQLFVEQHKHYLDEIIEQISEFSKRVILADANLDKVLSAYNKHRDKPIREQAENIIHLFTLTNLGAPAAFKYFDTTIDRKRYTSTKEVLDATLIHQSITGLYETRIDLSQLGGDGGEAAAKEAAAKEAAAKEAAAKEAAAKEAAAKGGTLNIEDEHRLHETSKEPDVSLGSTWLSDFPQAWAETGGMGLAVRQAPLIIPLKATSTPVSIKQYPMSQEARLGIKPHIQRLLDQGILVPCQSPWNTPLLPVKKPGTNDYRPVQDLREVNKRVEDIHPTVPNPYNLLSGLPPSHQWYTVLDLKDAFFCLRLHPTSQPLFAFEWRDPEMGISGQLTWTRLPQGFKNSPTLFNEALHRDLADFRIQHPDLILLQYVDDLLLAATSELDCQQGTRALLQTLGNLGYRASAKKAQICQKQVKYLGYLLKEGQRWLTEARKETVMGQPTPKTPRQLREFLGTAGFCRLWIPGFAEMAAPLYPLTKPGTLFNWGPDQQKAYQEIKQALLTAPALGLPDLTKPFELFVDEKQGYAKGVLTQKLGPWRRPVAYLSKKLDPVAAGWPPCLRMVAAIAVLTKDAGKLTMGQPLVILAPHAVEALVKQPPDRWLSNARMTHYQALLLDTDRVQFGPVVALNPATLLPLPEEGLQHNCLDILAEAHGTRPDLTDQPLPDADHTWYTDGSSLLQEGQRKAGAAVTTETEVIWAKALPAGTSAQRAELIALTQALKMAEGKKLNVYTDSRYAFATAHIHGEIYRRRGWLTSEGKEIKNKDEILALLKALFLPKRLSIIHCPGHQKGHSAEARGNRMADQAARKAAITETPDTSTLLAGKRTADGSEFEKRTADGSEFESPKKKAKVE

SEQ ID NO: 2993 - protein, 2094 aa, synthetic construct; identical to SEQ ID NO: 2766
  source 1..2094: note = Description of Artificial Sequence: Synthetic polypeptide

SEQ ID NO: 2994 - protein, 2094 aa, synthetic construct; identical to SEQ ID NO: 2773
  source 1..2094: note = Description of Artificial Sequence: Synthetic polypeptide

SEQ ID NO: 2995 - protein, 2097 aa, synthetic construct
  source 1..2097: note = Description of Artificial Sequence: Synthetic polypeptide
MPAAKRVKLDGGDKKYSIGLDIGTNSVGWAVITDEYKVPSKKFKVLGNTDRHSIKKNLIGALLFDSGETAEATRLKRTARRRYTRRKNRICYLQEIFSNEMAKVDDSFFHRLEESFLVEEDKKHERHPIFGNIVDEVAYHEKYPTIYHLRKKLVDSTDKADLRLIYLALAHMIKFRGHFLIEGDLNPDNSDVDKLFIQLVQTYNQLFEENPINASGVDAKAILSARLSKSRRLENLIAQLPGEKKNGLFGNLIALSLGLTPNFKSNFDLAEDAKLQLSKDTYDDDLDNLLAQIGDQYADLFLAAKNLSDAILLSDILRVNTEITKAPLSASMIKRYDEHHQDLTLLKALVRQQLPEKYKEIFFDQSKNGYAGYIDGGASQEEFYKFIKPILEKMDGTEELLVKLNREDLLRKQRTFDNGSIPHQIHLGELHAILRRQEDFYPFLKDNREKIEKILTFRIPYYVGPLARGNSRFAWMTRKSEETITPWNFEEVVDKGASAQSFIERMTNFDKNLPNEKVLPKHSLLYEYFTVYNELTKVKYVTEGMRKPAFLSGEQKKAIVDLLFKTNRKVTVKQLKEDYFKKIECFDSVEISGVEDRFNASLGTYHDLLKIIKDKDFLDNEENEDILEDIVLTLTLFEDREMIEERLKTYAHLFDDKVMKQLKRRRYTGWGRLSRKLINGIRDKQSGKTILDFLKSDGFANRNFMQLIHDDSLTFKEDIQKAQVSGQGDSLHEHIANLAGSPAIKKGILQTVKVVDELVKVMGRHKPENIVIEMARENQTTQKGQKNSRERMKRIEEGIKELGSQILKEHPVENTQLQNEKLYLYYLQNGRDMYVDQELDINRLSDYDVDHIVPQSFLKDDSIDNKVLTRSDKARGKSDNVPSEEVVKKMKNYWRQLLNAKLITQRKFDNLTKAERGGLSELDKAGFIKRQLVETRQITKHVAQILDSRMNTKYDENDKLIREVKVITLKSKLVSDFRKDFQFYKVREINNYHHAHDAYLNAVVGTALIKKYPKLESEFVYGDYKVYDVRKMIAKSEQEIGKATAKYFFYSNIMNFFKTEITLANGEIRKRPLIETNGETGEIVWDKGRDFATVRKVLSMPQVNIVKKTEVQTGGFSKESILPKRNSDKLIARKKDWDPKKYGGFDSPTVAYSVLVVAKVEKGKSKKLKSVKELLGITIMERSSFEKNPIDFLEAKGYKEVKKDLIIKLPKYSLFELENGRKRMLASAGELQKGNELALPSKYVNFLYLASHYEKLKGSPEDNEQKQLFVEQHKHYLDEIIEQISEFSKRVILADANLDKVLSAYNKHRDKPIREQAENIIHLFTLTNLGAPAAFKYFDTTIDRKRYTSTKEVLDATLIHQSITGLYETRIDLSQLGGDGGGSAGSAAGSGEFGGTLNIEDEHRLHETSKEPDVSLGSTWLSDFPQAWAETGGMGLAVRQAPLIIPLKATSTPVSIKQYPMSQEARLGIKPHIQRLLDQGILVPCQSPWNTPLLPVKKPGTNDYRPVQDLREVNKRVEDIHPTVPNPYNLLSGLPPSHQWYTVLDLKDAFFCLRLHPTSQPLFAFEWRDPEMGISGQLTWTRLPQGFKNSPTLFNEALHRDLADFRIQHPDLILLQYVDDLLLAATSELDCQQGTRALLQTLGNLGYRASAKKAQICQKQVKYLGYLLKEGQRWLTEARKETVMGQPTPKTPRQLREFLGTAGFCRLWIPGFAEMAAPLYPLTKPGTLFNWGPDQQKAYQEIKQALLTAPALGLPDLTKPFELFVDEKQGYAKGVLTQKLGPWRRPVAYLSKKLDPVAAGWPPCLRMVAAIAVLTKDAGKLTMGQPLVILAPHAVEALVKQPPDRWLSNARMTHYQALLLDTDRVQFGPVVALNPATLLPLPEEGLQHNCLDILAEAHGTRPDLTDQPLPDADHTWYTDGSSLLQEGQRKAGAAVTTETEVIWAKALPAGTSAQRAELIALTQALKMAEGKKLNVYTDSRYAFATAHIHGEIYRRRGWLTSEGKEIKNKDEILALLKALFLPKRLSIIHCPGHQKGHSAEARGNRMADQAARKAAITETPDTSTLLAGKRTADGSEFEKRTADGSEFESPKKKAKVE

SEQ ID NO: 2996 - protein, 2091 aa, synthetic construct
  source 1..2091: note = Description of Artificial Sequence: Synthetic polypeptide
MPAAKRVKLDGGDKKYSIGLDIGTNSVGWAVITDEYKVPSKKFKVLGNTDRHSIKKNLIGALLFDSGETAEATRLKRTARRRYTRRKNRICYLQEIFSNEMAKVDDSFFHRLEESFLVEEDKKHERHPIFGNIVDEVAYHEKYPTIYHLRKKLVDSTDKADLRLIYLALAHMIKFRGHFLIEGDLNPDNSDVDKLFIQLVQTYNQLFEENPINASGVDAKAILSARLSKSRRLENLIAQLPGEKKNGLFGNLIALSLGLTPNFKSNFDLAEDAKLQLSKDTYDDDLDNLLAQIGDQYADLFLAAKNLSDAILLSDILRVNTEITKAPLSASMIKRYDEHHQDLTLLKALVRQQLPEKYKEIFFDQSKNGYAGYIDGGASQEEFYKFIKPILEKMDGTEELLVKLNREDLLRKQRTFDNGSIPHQIHLGELHAILRRQEDFYPFLKDNREKIEKILTFRIPYYVGPLARGNSRFAWMTRKSEETITPWNFEEVVDKGASAQSFIERMTNFDKNLPNEKVLPKHSLLYEYFTVYNELTKVKYVTEGMRKPAFLSGEQKKAIVDLLFKTNRKVTVKQLKEDYFKKIECFDSVEISGVEDRFNASLGTYHDLLKIIKDKDFLDNEENEDILEDIVLTLTLFEDREMIEERLKTYAHLFDDKVMKQLKRRRYTGWGRLSRKLINGIRDKQSGKTILDFLKSDGFANRNFMQLIHDDSLTFKEDIQKAQVSGQGDSLHEHIANLAGSPAIKKGILQTVKVVDELVKVMGRHKPENIVIEMARENQTTQKGQKNSRERMKRIEEGIKELGSQILKEHPVENTQLQNEKLYLYYLQNGRDMYVDQELDINRLSDYDVDHIVPQSFLKDDSIDNKVLTRSDKARGKSDNVPSEEVVKKMKNYWRQLLNAKLITQRKFDNLTKAERGGLSELDKAGFIKRQLVETRQITKHVAQILDSRMNTKYDENDKLIREVKVITLKSKLVSDFRKDFQFYKVREINNYHHAHDAYLNAVVGTALIKKYPKLESEFVYGDYKVYDVRKMIAKSEQEIGKATAKYFFYSNIMNFFKTEITLANGEIRKRPLIETNGETGEIVWDKGRDFATVRKVLSMPQVNIVKKTEVQTGGFSKESILPKRNSDKLIARKKDWDPKKYGGFDSPTVAYSVLVVAKVEKGKSKKLKSVKELLGITIMERSSFEKNPIDFLEAKGYKEVKKDLIIKLPKYSLFELENGRKRMLASAGELQKGNELALPSKYVNFLYLASHYEKLKGSPEDNEQKQLFVEQHKHYLDEIIEQISEFSKRVILADANLDKVLSAYNKHRDKPIREQAENIIHLFTLTNLGAPAAFKYFDTTIDRKRYTSTKEVLDATLIHQSITGLYETRIDLSQLGGDGGPAPGSSGGTLNIEDEHRLHETSKEPDVSLGSTWLSDFPQAWAETGGMGLAVRQAPLIIPLKATSTPVSIKQYPMSQEARLGIKPHIQRLLDQGILVPCQSPWNTPLLPVKKPGTNDYRPVQDLREVNKRVEDIHPTVPNPYNLLSGLPPSHQWYTVLDLKDAFFCLRLHPTSQPLFAFEWRDPEMGISGQLTWTRLPQGFKNSPTLFNEALHRDLADFRIQHPDLILLQYVDDLLLAATSELDCQQGTRALLQTLGNLGYRASAKKAQICQKQVKYLGYLLKEGQRWLTEARKETVMGQPTPKTPRQLREFLGTAGFCRLWIPGFAEMAAPLYPLTKPGTLFNWGPDQQKAYQEIKQALLTAPALGLPDLTKPFELFVDEKQGYAKGVLTQKLGPWRRPVAYLSKKLDPVAAGWPPCLRMVAAIAVLTKDAGKLTMGQPLVILAPHAVEALVKQPPDRWLSNARMTHYQALLLDTDRVQFGPVVALNPATLLPLPEEGLQHNCLDILAEAHGTRPDLTDQPLPDADHTWYTDGSSLLQEGQRKAGAAVTTETEVIWAKALPAGTSAQRAELIALTQALKMAEGKKLNVYTDSRYAFATAHIHGEIYRRRGWLTSEGKEIKNKDEILALLKALFLPKRLSIIHCPGHQKGHSAEARGNRMADQAARKAAITETPDTSTLLAGKRTADGSEFEKRTADGSEFESPKKKAKVE

SEQ ID NO: 2997 - protein, 2096 aa, synthetic construct
  source 1..2096: note = Description of Artificial Sequence: Synthetic polypeptide
MPAAKRVKLDGGDKKYSIGLDIGTNSVGWAVITDEYKVPSKKFKVLGNTDRHSIKKNLIGALLFDSGETAEATRLKRTARRRYTRRKNRICYLQEIFSNEMAKVDDSFFHRLEESFLVEEDKKHERHPIFGNIVDEVAYHEKYPTIYHLRKKLVDSTDKADLRLIYLALAHMIKFRGHFLIEGDLNPDNSDVDKLFIQLVQTYNQLFEENPINASGVDAKAILSARLSKSRRLENLIAQLPGEKKNGLFGNLIALSLGLTPNFKSNFDLAEDAKLQLSKDTYDDDLDNLLAQIGDQYADLFLAAKNLSDAILLSDILRVNTEITKAPLSASMIKRYDEHHQDLTLLKALVRQQLPEKYKEIFFDQSKNGYAGYIDGGASQEEFYKFIKPILEKMDGTEELLVKLNREDLLRKQRTFDNGSIPHQIHLGELHAILRRQEDFYPFLKDNREKIEKILTFRIPYYVGPLARGNSRFAWMTRKSEETITPWNFEEVVDKGASAQSFIERMTNFDKNLPNEKVLPKHSLLYEYFTVYNELTKVKYVTEGMRKPAFLSGEQKKAIVDLLFKTNRKVTVKQLKEDYFKKIECFDSVEISGVEDRFNASLGTYHDLLKIIKDKDFLDNEENEDILEDIVLTLTLFEDREMIEERLKTYAHLFDDKVMKQLKRRRYTGWGRLSRKLINGIRDKQSGKTILDFLKSDGFANRNFMQLIHDDSLTFKEDIQKAQVSGQGDSLHEHIANLAGSPAIKKGILQTVKVVDELVKVMGRHKPENIVIEMARENQTTQKGQKNSRERMKRIEEGIKELGSQILKEHPVENTQLQNEKLYLYYLQNGRDMYVDQELDINRLSDYDVDHIVPQSFLKDDSIDNKVLTRSDKARGKSDNVPSEEVVKKMKNYWRQLLNAKLITQRKFDNLTKAERGGLSELDKAGFIKRQLVETRQITKHVAQILDSRMNTKYDENDKLIREVKVITLKSKLVSDFRKDFQFYKVREINNYHHAHDAYLNAVVGTALIKKYPKLESEFVYGDYKVYDVRKMIAKSEQEIGKATAKYFFYSNIMNFFKTEITLANGEIRKRPLIETNGETGEIVWDKGRDFATVRKVLSMPQVNIVKKTEVQTGGFSKESILPKRNSDKLIARKKDWDPKKYGGFDSPTVAYSVLVVAKVEKGKSKKLKSVKELLGITIMERSSFEKNPIDFLEAKGYKEVKKDLIIKLPKYSLFELENGRKRMLASAGELQKGNELALPSKYVNFLYLASHYEKLKGSPEDNEQKQLFVEQHKHYLDEIIEQISEFSKRVILADANLDKVLSAYNKHRDKPIREQAENIIHLFTLTNLGAPAAFKYFDTTIDRKRYTSTKEVLDATLIHQSITGLYETRIDLSQLGGDGGEAAAKGGGGSSGGTLNIEDEHRLHETSKEPDVSLGSTWLSDFPQAWAETGGMGLAVRQAPLIIPLKATSTPVSIKQYPMSQEARLGIKPHIQRLLDQGILVPCQSPWNTPLLPVKKPGTNDYRPVQDLREVNKRVEDIHPTVPNPYNLLSGLPPSHQWYTVLDLKDAFFCLRLHPTSQPLFAFEWRDPEMGISGQLTWTRLPQGFKNSPTLFNEALHRDLADFRIQHPDLILLQYVDDLLLAATSELDCQQGTRALLQTLGNLGYRASAKKAQICQKQVKYLGYLLKEGQRWLTEARKETVMGQPTPKTPRQLREFLGTAGFCRLWIPGFAEMAAPLYPLTKPGTLFNWGPDQQKAYQEIKQALLTAPALGLPDLTKPFELFVDEKQGYAKGVLTQKLGPWRRPVAYLSKKLDPVAAGWPPCLRMVAAIAVLTKDAGKLTMGQPLVILAPHAVEALVKQPPDRWLSNARMTHYQALLLDTDRVQFGPVVALNPATLLPLPEEGLQHNCLDILAEAHGTRPDLTDQPLPDADHTWYTDGSSLLQEGQRKAGAAVTTETEVIWAKALPAGTSAQRAELIALTQALKMAEGKKLNVYTDSRYAFATAHIHGEIYRRRGWLTSEGKEIKNKDEILALLKALFLPKRLSIIHCPGHQKGHSAEARGNRMADQAARKAAITETPDTSTLLAGKRTADGSEFEKRTADGSEFESPKKKAKVE

SEQ ID NO: 2998 - protein, 2100 aa, synthetic construct
  source 1..2100: note = Description of Artificial Sequence: Synthetic polypeptide
MPAAKRVKLDGGDKKYSIGLDIGTNSVGWAVITDEYKVPSKKFKVLGNTDRHSIKKNLIGALLFDSGETAEATRLKRTARRRYTRRKNRICYLQEIFSNEMAKVDDSFFHRLEESFLVEEDKKHERHPIFGNIVDEVAYHEKYPTIYHLRKKLVDSTDKADLRLIYLALAHMIKFRGHFLIEGDLNPDNSDVDKLFIQLVQTYNQLFEENPINASGVDAKAILSARLSKSRRLENLIAQLPGEKKNGLFGNLIALSLGLTPNFKSNFDLAEDAKLQLSKDTYDDDLDNLLAQIGDQYADLFLAAKNLSDAILLSDILRVNTEITKAPLSASMIKRYDEHHQDLTLLKALVRQQLPEKYKEIFFDQSKNGYAGYIDGGASQEEFYKFIKPILEKMDGTEELLVKLNREDLLRKQRTFDNGSIPHQIHLGELHAILRRQEDFYPFLKDNREKIEKILTFRIPYYVGPLARGNSRFAWMTRKSEETITPWNFEEVVDKGASAQSFIERMTNFDKNLPNEKVLPKHSLLYEYFTVYNELTKVKYVTEGMRKPAFLSGEQKKAIVDLLFKTNRKVTVKQLKEDYFKKIECFDSVEISGVEDRFNASLGTYHDLLKIIKDKDFLDNEENEDILEDIVLTLTLFEDREMIEERLKTYAHLFDDKVMKQLKRRRYTGWGRLSRKLINGIRDKQSGKTILDFLKSDGFANRNFMQLIHDDSLTFKEDIQKAQVSGQGDSLHEHIANLAGSPAIKKGILQTVKVVDELVKVMGRHKPENIVIEMARENQTTQKGQKNSRERMKRIEEGIKELGSQILKEHPVENTQLQNEKLYLYYLQNGRDMYVDQELDINRLSDYDVDHIVPQSFLKDDSIDNKVLTRSDKARGKSDNVPSEEVVKKMKNYWRQLLNAKLITQRKFDNLTKAERGGLSELDKAGFIKRQLVETRQITKHVAQILDSRMNTKYDENDKLIREVKVITLKSKLVSDFRKDFQFYKVREINNYHHAHDAYLNAVVGTALIKKYPKLESEFVYGDYKVYDVRKMIAKSEQEIGKATAKYFFYSNIMNFFKTEITLANGEIRKRPLIETNGETGEIVWDKGRDFATVRKVLSMPQVNIVKKTEVQTGGFSKESILPKRNSDKLIARKKDWDPKKYGGFDSPTVAYSVLVVAKVEKGKSKKLKSVKELLGITIMERSSFEKNPIDFLEAKGYKEVKKDLIIKLPKYSLFELENGRKRMLASAGELQKGNELALPSKYVNFLYLASHYEKLKGSPEDNEQKQLFVEQHKHYLDEIIEQISEFSKRVILADANLDKVLSAYNKHRDKPIREQAENIIHLFTLTNLGAPAAFKYFDTTIDRKRYTSTKEVLDATLIHQSITGLYETRIDLSQLGGDGGGSSGSSGSSGSSGSSGGTLNIEDEHRLHETSKEPDVSLGSTWLSDFPQAWAETGGMGLAVRQAPLIIPLKATSTPVSIKQYPMSQEARLGIKPHIQRLLDQGILVPCQSPWNTPLLPVKKPGTNDYRPVQDLREVNKRVEDIHPTVPNPYNLLSGLPPSHQWYTVLDLKDAFFCLRLHPTSQPLFAFEWRDPEMGISGQLTWTRLPQGFKNSPTLFNEALHRDLADFRIQHPDLILLQYVDDLLLAATSELDCQQGTRALLQTLGNLGYRASAKKAQICQKQVKYLGYLLKEGQRWLTEARKETVMGQPTPKTPRQLREFLGTAGFCRLWIPGFAEMAAPLYPLTKPGTLFNWGPDQQKAYQEIKQALLTAPALGLPDLTKPFELFVDEKQGYAKGVLTQKLGPWRRPVAYLSKKLDPVAAGWPPCLRMVAAIAVLTKDAGKLTMGQPLVILAPHAVEALVKQPPDRWLSNARMTHYQALLLDTDRVQFGPVVALNPATLLPLPEEGLQHNCLDILAEAHGTRPDLTDQPLPDADHTWYTDGSSLLQEGQRKAGAAVTTETEVIWAKALPAGTSAQRAELIALTQALKMAEGKKLNVYTDSRYAFATAHIHGEIYRRRGWLTSEGKEIKNKDEILALLKALFLPKRLSIIHCPGHQKGHSAEARGNRMADQAARKAAITETPDTSTLLAGKRTADGSEFEKRTADGSEFESPKKKAKVE

SEQ ID NO: 2999 - protein, 2096 aa, synthetic construct; identical to SEQ ID NO: 2719
  source 1..2096: note = Description of Artificial Sequence: Synthetic polypeptide

SEQ ID NO: 3000 - protein, 2088 aa, synthetic construct
  source 1..2088: note = Description of Artificial Sequence: Synthetic polypeptide
MPAAKRVKLDGGDKKYSIGLDIGTNSVGWAVITDEYKVPSKKFKVLGNTDRHSIKKNLIGALLFDSGETAEATRLKRTARRRYTRRKNRICYLQEIFSNEMAKVDDSFFHRLEESFLVEEDKKHERHPIFGNIVDEVAYHEKYPTIYHLRKKLVDSTDKADLRLIYLALAHMIKFRGHFLIEGDLNPDNSDVDKLFIQLVQTYNQLFEENPINASGVDAKAILSARLSKSRRLENLIAQLPGEKKNGLFGNLIALSLGLTPNFKSNFDLAEDAKLQLSKDTYDDDLDNLLAQIGDQYADLFLAAKNLSDAILLSDILRVNTEITKAPLSASMIKRYDEHHQDLTLLKALVRQQLPEKYKEIFFDQSKNGYAGYIDGGASQEEFYKFIKPILEKMDGTEELLVKLNREDLLRKQRTFDNGSIPHQIHLGELHAILRRQEDFYPFLKDNREKIEKILTFRIPYYVGPLARGNSRFAWMTRKSEETITPWNFEEVVDKGASAQSFIERMTNFDKNLPNEKVLPKHSLLYEYFTVYNELTKVKYVTEGMRKPAFLSGEQKKAIVDLLFKTNRKVTVKQLKEDYFKKIECFDSVEISGVEDRFNASLGTYHDLLKIIKDKDFLDNEENEDILEDIVLTLTLFEDREMIEERLKTYAHLFDDKVMKQLKRRRYTGWGRLSRKLINGIRDKQSGKTILDFLKSDGFANRNFMQLIHDDSLTFKEDIQKAQVSGQGDSLHEHIANLAGSPAIKKGILQTVKVVDELVKVMGRHKPENIVIEMARENQTTQKGQKNSRERMKRIEEGIKELGSQILKEHPVENTQLQNEKLYLYYLQNGRDMYVDQELDINRLSDYDVDHIVPQSFLKDDSIDNKVLTRSDKARGKSDNVPSEEVVKKMKNYWRQLLNAKLITQRKFDNLTKAERGGLSELDKAGFIKRQLVETRQITKHVAQILDSRMNTKYDENDKLIREVKVITLKSKLVSDFRKDFQFYKVREINNYHHAHDAYLNAVVGTALIKKYPKLESEFVYGDYKVYDVRKMIAKSEQEIGKATAKYFFYSNIMNFFKTEITLANGEIRKRPLIETNGETGEIVWDKGRDFATVRKVLSMPQVNIVKKTEVQTGGFSKESILPKRNSDKLIARKKDWDPKKYGGFDSPTVAYSVLVVAKVEKGKSKKLKSVKELLGITIMERSSFEKNPIDFLEAKGYKEVKKDLIIKLPKYSLFELENGRKRMLASAGELQKGNELALPSKYVNFLYLASHYEKLKGSPEDNEQKQLFVEQHKHYLDEIIEQISEFSKRVILADANLDKVLSAYNKHRDKPIREQAENIIHLFTLTNLGAPAAFKYFDTTIDRKRYTSTKEVLDATLIHQSITGLYETRIDLSQLGGDGGGGSGGTLNIEDEHRLHETSKEPDVSLGSTWLSDFPQAWAETGGMGLAVRQAPLIIPLKATSTPVSIKQYPMSQEARLGIKPHIQRLLDQGILVPCQSPWNTPLLPVKKPGTNDYRPVQDLREVNKRVEDIHPTVPNPYNLLSGLPPSHQWYTVLDLKDAFFCLRLHPTSQPLFAFEWRDPEMGISGQLTWTRLPQGFKNSPTLFNEALHRDLADFRIQHPDLILLQYVDDLLLAATSELDCQQGTRALLQTLGNLGYRASAKKAQICQKQVKYLGYLLKEGQRWLTEARKETVMGQPTPKTPRQLREFLGTAGFCRLWIPGFAEMAAPLYPLTKPGTLFNWGPDQQKAYQEIKQALLTAPALGLPDLTKPFELFVDEKQGYAKGVLTQKLGPWRRPVAYLSKKLDPVAAGWPPCLRMVAAIAVLTKDAGKLTMGQPLVILAPHAVEALVKQPPDRWLSNARMTHYQALLLDTDRVQFGPVVALNPATLLPLPEEGLQHNCLDILAEAHGTRPDLTDQPLPDADHTWYTDGSSLLQEGQRKAGAAVTTETEVIWAKALPAGTSAQRAELIALTQALKMAEGKKLNVYTDSRYAFATAHIHGEIYRRRGWLTSEGKEIKNKDEILALLKALFLPKRLSIIHCPGHQKGHSAEARGNRMADQAARKAAITETPDTSTLLAGKRTADGSEFEKRTADGSEFESPKKKAKVE

SEQ ID NO: 3001 - protein, 2100 aa, synthetic construct; identical to SEQ ID NO: 2725
  source 1..2100: note = Description of Artificial Sequence: Synthetic polypeptide

SEQ ID NO: 3002 - protein, 2093 aa, synthetic construct; identical to SEQ ID NO: 2740
  source 1..2093: note = Description of Artificial Sequence: Synthetic polypeptide

SEQ ID NO: 3003 - protein, 2094 aa, synthetic construct; identical to SEQ ID NO: 2752
  source 1..2094: note = Description of Artificial Sequence: Synthetic polypeptide

SEQ ID NO: 3004 - protein, 2097 aa, synthetic construct; identical to SEQ ID NO: 2763
  source 1..2097: note = Description of Artificial Sequence: Synthetic polypeptide

SEQ ID NO: 3005 - protein, 2096 aa, synthetic construct
  source 1..2096: note = Description of Artificial Sequence: Synthetic polypeptide
MPAAKRVKLDGGDKKYSIGLDIGTNSVGWAVITDEYKVPSKKFKVLGNTDRHSIKKNLIGALLFDSGETAEATRLKRTARRRYTRRKNRICYLQEIFSNEMAKVDDSFFHRLEESFLVEEDKKHERHPIFGNIVDEVAYHEKYPTIYHLRKKLVDSTDKADLRLIYLALAHMIKFRGHFLIEGDLNPDNSDVDKLFIQLVQTYNQLFEENPINASGVDAKAILSARLSKSRRLENLIAQLPGEKKNGLFGNLIALSLGLTPNFKSNFDLAEDAKLQLSKDTYDDDLDNLLAQIGDQYADLFLAAKNLSDAILLSDILRVNTEITKAPLSASMIKRYDEHHQDLTLLKALVRQQLPEKYKEIFFDQSKNGYAGYIDGGASQEEFYKFIKPILEKMDGTEELLVKLNREDLLRKQRTFDNGSIPHQIHLGELHAILRRQEDFYPFLKDNREKIEKILTFRIPYYVGPLARGNSRFAWMTRKSEETITPWNFEEVVDKGASAQSFIERMTNFDKNLPNEKVLPKHSLLYEYFTVYNELTKVKYVTEGMRKPAFLSGEQKKAIVDLLFKTNRKVTVKQLKEDYFKKIECFDSVEISGVEDRFNASLGTYHDLLKIIKDKDFLDNEENEDILEDIVLTLTLFEDREMIEERLKTYAHLFDDKVMKQLKRRRYTGWGRLSRKLINGIRDKQSGKTILDFLKSDGFANRNFMQLIHDDSLTFKEDIQKAQVSGQGDSLHEHIANLAGSPAIKKGILQTVKVVDELVKVMGRHKPENIVIEMARENQTTQKGQKNSRERMKRIEEGIKELGSQILKEHPVENTQLQNEKLYLYYLQNGRDMYVDQELDINRLSDYDVDHIVPQSFLKDDSIDNKVLTRSDKARGKSDNVPSEEVVKKMKNYWRQLLNAKLITQRKFDNLTKAERGGLSELDKAGFIKRQLVETRQITKHVAQILDSRMNTKYDENDKLIREVKVITLKSKLVSDFRKDFQFYKVREINNYHHAHDAYLNAVVGTALIKKYPKLESEFVYGDYKVYDVRKMIAKSEQEIGKATAKYFFYSNIMNFFKTEITLANGEIRKRPLIETNGETGEIVWDKGRDFATVRKVLSMPQVNIVKKTEVQTGGFSKESILPKRNSDKLIARKKDWDPKKYGGFDSPTVAYSVLVVAKVEKGKSKKLKSVKELLGITIMERSSFEKNPIDFLEAKGYKEVKKDLIIKLPKYSLFELENGRKRMLASAGELQKGNELALPSKYVNFLYLASHYEKLKGSPEDNEQKQLFVEQHKHYLDEIIEQISEFSKRVILADANLDKVLSAYNKHRDKPIREQAENIIHLFTLTNLGAPAAFKYFDTTIDRKRYTSTKEVLDATLIHQSITGLYETRIDLSQLGGDGGEAAAKPAPGSSGGTLNIEDEHRLHETSKEPDVSLGSTWLSDFPQAWAETGGMGLAVRQAPLIIPLKATSTPVSIKQYPMSQEARLGIKPHIQRLLDQGILVPCQSPWNTPLLPVKKPGTNDYRPVQDLREVNKRVEDIHPTVPNPYNLLSGLPPSHQWYTVLDLKDAFFCLRLHPTSQPLFAFEWRDPEMGISGQLTWTRLPQGFKNSPTLFNEALHRDLADFRIQHPDLILLQYVDDLLLAATSELDCQQGTRALLQTLGNLGYRASAKKAQICQKQVKYLGYLLKEGQRWLTEARKETVMGQPTPKTPRQLREFLGTAGFCRLWIPGFAEMAAPLYPLTKPGTLFNWGPDQQKAYQEIKQALLTAPALGLPDLTKPFELFVDEKQGYAKGVLTQKLGPWRRPVAYLSKKLDPVAAGWPPCLRMVAAIAVLTKDAGKLTMGQPLVILAPHAVEALVKQPPDRWLSNARMTHYQALLLDTDRVQFGPVVALNPATLLPLPEEGLQHNCLDILAEAHGTRPDLTDQPLPDADHTWYTDGSSLLQEGQRKAGAAVTTETEVIWAKALPAGTSAQRAELIALTQALKMAEGKKLNVYTDSRYAFATAHIHGEIYRRRGWLTSEGKEIKNKDEILALLKALFLPKRLSIIHCPGHQKGHSAEARGNRMADQAARKAAITETPDTSTLLAGKRTADGSEFEKRTADGSEFESPKKKAKVE

SEQ ID NO: 3006 - protein, 2089 aa, synthetic construct
  source 1..2089: note = Description of Artificial Sequence: Synthetic polypeptide
MPAAKRVKLDGGDKKYSIGLDIGTNSVGWAVITDEYKVPSKKFKVLGNTDRHSIKKNLIGALLFDSGETAEATRLKRTARRRYTRRKNRICYLQEIFSNEMAKVDDSFFHRLEESFLVEEDKKHERHPIFGNIVDEVAYHEKYPTIYHLRKKLVDSTDKADLRLIYLALAHMIKFRGHFLIEGDLNPDNSDVDKLFIQLVQTYNQLFEENPINASGVDAKAILSARLSKSRRLENLIAQLPGEKKNGLFGNLIALSLGLTPNFKSNFDLAEDAKLQLSKDTYDDDLDNLLAQIGDQYADLFLAAKNLSDAILLSDILRVNTEITKAPLSASMIKRYDEHHQDLTLLKALVRQQLPEKYKEIFFDQSKNGYAGYIDGGASQEEFYKFIKPILEKMDGTEELLVKLNREDLLRKQRTFDNGSIPHQIHLGELHAILRRQEDFYPFLKDNREKIEKILTFRIPYYVGPLARGNSRFAWMTRKSEETITPWNFEEVVDKGASAQSFIERMTNFDKNLPNEKVLPKHSLLYEYFTVYNELTKVKYVTEGMRKPAFLSGEQKKAIVDLLFKTNRKVTVKQLKEDYFKKIECFDSVEISGVEDRFNASLGTYHDLLKIIKDKDFLDNEENEDILEDIVLTLTLFEDREMIEERLKTYAHLFDDKVMKQLKRRRYTGWGRLSRKLINGIRDKQSGKTILDFLKSDGFANRNFMQLIHDDSLTFKEDIQKAQVSGQGDSLHEHIANLAGSPAIKKGILQTVKVVDELVKVMGRHKPENIVIEMARENQTTQKGQKNSRERMKRIEEGIKELGSQILKEHPVENTQLQNEKLYLYYLQNGRDMYVDQELDINRLSDYDVDHIVPQSFLKDDSIDNKVLTRSDKARGKSDNVPSEEVVKKMKNYWRQLLNAKLITQRKFDNLTKAERGGLSELDKAGFIKRQLVETRQITKHVAQILDSRMNTKYDENDKLIREVKVITLKSKLVSDFRKDFQFYKVREINNYHHAHDAYLNAVVGTALIKKYPKLESEFVYGDYKVYDVRKMIAKSEQEIGKATAKYFFYSNIMNFFKTEITLANGEIRKRPLIETNGETGEIVWDKGRDFATVRKVLSMPQVNIVKKTEVQTGGFSKESILPKRNSDKLIARKKDWDPKKYGGFDSPTVAYSVLVVAKVEKGKSKKLKSVKELLGITIMERSSFEKNPIDFLEAKGYKEVKKDLIIKLPKYSLFELENGRKRMLASAGELQKGNELALPSKYVNFLYLASHYEKLKGSPEDNEQKQLFVEQHKHYLDEIIEQISEFSKRVILADANLDKVLSAYNKHRDKPIREQAENIIHLFTLTNLGAPAAFKYFDTTIDRKRYTSTKEVLDATLIHQSITGLYETRIDLSQLGGDGGGGGGGGTLNIEDEHRLHETSKEPDVSLGSTWLSDFPQAWAETGGMGLAVRQAPLIIPLKATSTPVSIKQYPMSQEARLGIKPHIQRLLDQGILVPCQSPWNTPLLPVKKPGTNDYRPVQDLREVNKRVEDIHPTVPNPYNLLSGLPPSHQWYTVLDLKDAFFCLRLHPTSQPLFAFEWRDPEMGISGQLTWTRLPQGFKNSPTLFNEALHRDLADFRIQHPDLILLQYVDDLLLAATSELDCQQGTRALLQTLGNLGYRASAKKAQICQKQVKYLGYLLKEGQRWLTEARKETVMGQPTPKTPRQLREFLGTAGFCRLWIPGFAEMAAPLYPLTKPGTLFNWGPDQQKAYQEIKQALLTAPALGLPDLTKPFELFVDEKQGYAKGVLTQKLGPWRRPVAYLSKKLDPVAAGWPPCLRMVAAIAVLTKDAGKLTMGQPLVILAPHAVEALVKQPPDRWLSNARMTHYQALLLDTDRVQFGPVVALNPATLLPLPEEGLQHNCLDILAEAHGTRPDLTDQPLPDADHTWYTDGSSLLQEGQRKAGAAVTTETEVIWAKALPAGTSAQRAELIALTQALKMAEGKKLNVYTDSRYAFATAHIHGEIYRRRGWLTSEGKEIKNKDEILALLKALFLPKRLSIIHCPGHQKGHSAEARGNRMADQAARKAAITETPDTSTLLAGKRTADGSEFEKRTADGSEFESPKKKAKVE

SEQ ID NO: 3007 - protein, 2096 aa, synthetic construct; identical to SEQ ID NO: 2748
  source 1..2096: note = Description of Artificial Sequence: Synthetic polypeptide

SEQ ID NO: 3008 - protein, 2090 aa, synthetic construct; identical to SEQ ID NO: 2730
  source 1..2090: note = Description of Artificial Sequence: Synthetic polypeptide

SEQ ID NO: 3009 - protein, 2096 aa, synthetic construct
  source 1..2096: note = Description of Artificial Sequence: Synthetic polypeptide
MPAAKRVKLDGGDKKYSIGLDIGTNSVGWAVITDEYKVPSKKFKVLGNTDRHSIKKNLIGALLFDSGETAEATRLKRTARRRYTRRKNRICYLQEIFSNEMAKVDDSFFHRLEESFLVEEDKKHERHPIFGNIVDEVAYHEKYPTIYHLRKKLVDSTDKADLRLIYLALAHMIKFRGHFLIEGDLNPDNSDVDKLFIQLVQTYNQLFEENPINASGVDAKAILSARLSKSRRLENLIAQLPGEKKNGLFGNLIALSLGLTPNFKSNFDLAEDAKLQLSKDTYDDDLDNLLAQIGDQYADLFLAAKNLSDAILLSDILRVNTEITKAPLSASMIKRYDEHHQDLTLLKALVRQQLPEKYKEIFFDQSKNGYAGYIDGGASQEEFYKFIKPILEKMDGTEELLVKLNREDLLRKQRTFDNGSIPHQIHLGELHAILRRQEDFYPFLKDNREKIEKILTFRIPYYVGPLARGNSRFAWMTRKSEETITPWNFEEVVDKGASAQSFIERMTNFDKNLPNEKVLPKHSLLYEYFTVYNELTKVKYVTEGMRKPAFLSGEQKKAIVDLLFKTNRKVTVKQLKEDYFKKIECFDSVEISGVEDRFNASLGTYHDLLKIIKDKDFLDNEENEDILEDIVLTLTLFEDREMIEERLKTYAHLFDDKVMKQLKRRRYTGWGRLSRKLINGIRDKQSGKTILDFLKSDGFANRNFMQLIHDDSLTFKEDIQKAQVSGQGDSLHEHIANLAGSPAIKKGILQTVKVVDELVKVMGRHKPENIVIEMARENQTTQKGQKNSRERMKRIEEGIKELGSQILKEHPVENTQLQNEKLYLYYLQNGRDMYVDQELDINRLSDYDVDHIVPQSFLKDDSIDNKVLTRSDKARGKSDNVPSEEVVKKMKNYWRQLLNAKLITQRKFDNLTKAERGGLSELDKAGFIKRQLVETRQITKHVAQILDSRMNTKYDENDKLIREVKVITLKSKLVSDFRKDFQFYKVREINNYHHAHDAYLNAVVGTALIKKYPKLESEFVYGDYKVYDVRKMIAKSEQEIGKATAKYFFYSNIMNFFKTEITLANGEIRKRPLIETNGETGEIVWDKGRDFATVRKVLSMPQVNIVKKTEVQTGGFSKESILPKRNSDKLIARKKDWDPKKYGGFDSPTVAYSVLVVAKVEKGKSKKLKSVKELLGITIMERSSFEKNPIDFLEAKGYKEVKKDLIIKLPKYSLFELENGRKRMLASAGELQKGNELALPSKYVNFLYLASHYEKLKGSPEDNEQKQLFVEQHKHYLDEIIEQISEFSKRVILADANLDKVLSAYNKHRDKPIREQAENIIHLFTLTNLGAPAAFKYFDTTIDRKRYTSTKEVLDATLIHQSITGLYETRIDLSQLGGDGGPAPEAAAKGGGGGTLNIEDEHRLHETSKEPDVSLGSTWLSDFPQAWAETGGMGLAVRQAPLIIPLKATSTPVSIKQYPMSQEARLGIKPHIQRLLDQGILVPCQSPWNTPLLPVKKPGTNDYRPVQDLREVNKRVEDIHPTVPNPYNLLSGLPPSHQWYTVLDLKDAFFCLRLHPTSQPLFAFEWRDPEMGISGQLTWTRLPQGFKNSPTLFNEALHRDLADFRIQHPDLILLQYVDDLLLAATSELDCQQGTRALLQTLGNLGYRASAKKAQICQKQVKYLGYLLKEGQRWLTEARKETVMGQPTPKTPRQLREFLGTAGFCRLWIPGFAEMAAPLYPLTKPGTLFNWGPDQQKAYQEIKQALLTAPALGLPDLTKPFELFVDEKQGYAKGVLTQKLGPWRRPVAYLSKKLDPVAAGWPPCLRMVAAIAVLTKDAGKLTMGQPLVILAPHAVEALVKQPPDRWLSNARMTHYQALLLDTDRVQFGPVVALNPATLLPLPEEGLQHNCLDILAEAHGTRPDLTDQPLPDADHTWYTDGSSLLQEGQRKAGAAVTTETEVIWAKALPAGTSAQRAELIALTQALKMAEGKKLNVYTDSRYAFATAHIHGEIYRRRGWLTSEGKEIKNKDEILALLKALFLPKRLSIIHCPGHQKGHSAEARGNRMADQAARKAAITETPDTSTLLAGKRTADGSEFEKRTADGSEFESPKKKAKVE

SEQ ID NO: 3010 - protein, 2101 aa, synthetic construct
  source 1..2101: note = Description of Artificial Sequence: Synthetic polypeptide
MPAAKRVKLDGGDKKYSIGLDIGTNSVGWAVITDEYKVPSKKFKVLGNTDRHSIKKNLIGALLFDSGETAEATRLKRTARRRYTRRKNRICYLQEIFSNEMAKVDDSFFHRLEESFLVEEDKKHERHPIFGNIVDEVAYHEKYPTIYHLRKKLVDSTDKADLRLIYLALAHMIKFRGHFLIEGDLNPDNSDVDKLFIQLVQTYNQLFEENPINASGVDAKAILSARLSKSRRLENLIAQLPGEKKNGLFGNLIALSLGLTPNFKSNFDLAEDAKLQLSKDTYDDDLDNLLAQIGDQYADLFLAAKNLSDAILLSDILRVNTEITKAPLSASMIKRYDEHHQDLTLLKALVRQQLPEKYKEIFFDQSKNGYAGYIDGGASQEEFYKFIKPILEKMDGTEELLVKLNREDLLRKQRTFDNGSIPHQIHLGELHAILRRQEDFYPFLKDNREKIEKILTFRIPYYVGPLARGNSRFAWMTRKSEETITPWNFEEVVDKGASAQSFIERMTNFDKNLPNEKVLPKHSLLYEYFTVYNELTKVKYVTEGMRKPAFLSGEQKKAIVDLLFKTNRKVTVKQLKEDYFKKIECFDSVEISGVEDRFNASLGTYHDLLKIIKDKDFLDNEENEDILEDIVLTLTLFEDREMIEERLKTYAHLFDDKVMKQLKRRRYTGWGRLSRKLINGIRDKQSGKTILDFLKSDGFANRNFMQLIHDDSLTFKEDIQKAQVSGQGDSLHEHIANLAGSPAIKKGILQTVKVVDELVKVMGRHKPENIVIEMARENQTTQKGQKNSRERMKRIEEGIKELGSQILKEHPVENTQLQNEKLYLYYLQNGRDMYVDQELDINRLSDYDVDHIVPQSFLKDDSIDNKVLTRSDKARGKSDNVPSEEVVKKMKNYWRQLLNAKLITQRKFDNLTKAERGGLSELDKAGFIKRQLVETRQITKHVAQILDSRMNTKYDENDKLIREVKVITLKSKLVSDFRKDFQFYKVREINNYHHAHDAYLNAVVGTALIKKYPKLESEFVYGDYKVYDVRKMIAKSEQEIGKATAKYFFYSNIMNFFKTEITLANGEIRKRPLIETNGETGEIVWDKGRDFATVRKVLSMPQVNIVKKTEVQTGGFSKESILPKRNSDKLIARKKDWDPKKYGGFDSPTVAYSVLVVAKVEKGKSKKLKSVKELLGITIMERSSFEKNPIDFLEAKGYKEVKKDLIIKLPKYSLFELENGRKRMLASAGELQKGNELALPSKYVNFLYLASHYEKLKGSPEDNEQKQLFVEQHKHYLDEIIEQISEFSKRVILADANLDKVLSAYNKHRDKPIREQAENIIHLFTLTNLGAPAAFKYFDTTIDRKRYTSTKEVLDATLIHQSITGLYETRIDLSQLGGDGGSGSETPGTSESATPESGGTLNIEDEHRLHETSKEPDVSLGSTWLSDFPQAWAETGGMGLAVRQAPLIIPLKATSTPVSIKQYPMSQEARLGIKPHIQRLLDQGILVPCQSPWNTPLLPVKKPGTNDYRPVQDLREVNKRVEDIHPTVPNPYNLLSGLPPSHQWYTVLDLKDAFFCLRLHPTSQPLFAFEWRDPEMGISGQLTWTRLPQGFKNSPTLFNEALHRDLADFRIQHPDLILLQYVDDLLLAATSELDCQQGTRALLQTLGNLGYRASAKKAQICQKQVKYLGYLLKEGQRWLTEARKETVMGQPTPKTPRQLREFLGTAGFCRLWIPGFAEMAAPLYPLTKPGTLFNWGPDQQKAYQEIKQALLTAPALGLPDLTKPFELFVDEKQGYAKGVLTQKLGPWRRPVAYLSKKLDPVAAGWPPCLRMVAAIAVLTKDAGKLTMGQPLVILAPHAVEALVKQPPDRWLSNARMTHYQALLLDTDRVQFGPVVALNPATLLPLPEEGLQHNCLDILAEAHGTRPDLTDQPLPDADHTWYTDGSSLLQEGQRKAGAAVTTETEVIWAKALPAGTSAQRAELIALTQALKMAEGKKLNVYTDSRYAFATAHIHGEIYRRRGWLTSEGKEIKNKDEILALLKALFLPKRLSIIHCPGHQKGHSAEARGNRMADQAARKAAITETPDTSTLLAGKRTADGSEFEKRTADGSEFESPKKKAKVE

SEQ ID NO: 3011 - protein, 2091 aa, synthetic construct
  source 1..2091: note = Description of Artificial Sequence: Synthetic polypeptide
MPAAKRVKLDGGDKKYSIGLDIGTNSVGWAVITDEYKVPSKKFKVLGNTDRHSIKKNLIGALLFDSGETAEATRLKRTARRRYTRRKNRICYLQEIFSNEMAKVDDSFFHRLEESFLVEEDKKHERHPIFGNIVDEVAYHEKYPTIYHLRKKLVDSTDKADLRLIYLALAHMIKFRGHFLIEGDLNPDNSDVDKLFIQLVQTYNQLFEENPINASGVDAKAILSARLSKSRRLENLIAQLPGEKKNGLFGNLIALSLGLTPNFKSNFDLAEDAKLQLSKDTYDDDLDNLLAQIGDQYADLFLAAKNLSDAILLSDILRVNTEITKAPLSASMIKRYDEHHQDLTLLKALVRQQLPEKYKEIFFDQSKNGYAGYIDGGASQEEFYKFIKPILEKMDGTEELLVKLNREDLLRKQRTFDNGSIPHQIHLGELHAILRRQEDFYPFLKDNREKIEKILTFRIPYYVGPLARGNSRFAWMTRKSEETITPWNFEEVVDKGASAQSFIERMTNFDKNLPNEKVLPKHSLLYEYFTVYNELTKVKYVTEGMRKPAFLSGEQKKAIVDLLFKTNRKVTVKQLKEDYFKKIECFDSVEISGVEDRFNASLGTYHDLLKIIKDKDFLDNEENEDILEDIVLTLTLFEDREMIEERLKTYAHLFDDKVMKQLKRRRYTGWGRLSRKLINGIRDKQSGKTILDFLKSDGFANRNFMQLIHDDSLTFKEDIQKAQVSGQGDSLHEHIANLAGSPAIKKGILQTVKVVDELVKVMGRHKPENIVIEMARENQTTQKGQKNSRERMKRIEEGIKELGSQILKEHPVENTQLQNEKLYLYYLQNGRDMYVDQELDINRLSDYDVDHIVPQSFLKDDSIDNKVLTRSDKARGKSDNVPSEEVVKKMKNYWRQLLNAKLITQRKFDNLTKAERGGLSELDKAGFIKRQLVETRQITKHVAQILDSRMNTKYDENDKLIREVKVITLKSKLVSDFRKDFQFYKVREINNYHHAHDAYLNAVVGTALIKKYPKLESEFVYGDYKVYDVRKMIAKSEQEIGKATAKYFFYSNIMNFFKTEITLANGEIRKRPLIETNGETGEIVWDKGRDFATVRKVLSMPQVNIVKKTEVQTGGFSKESILPKRNSDKLIARKKDWDPKKYGGFDSPTVAYSVLVVAKVEKGKSKKLKSVKELLGITIMERSSFEKNPIDFLEAKGYKEVKKDLIIKLPKYSLFELENGRKRMLASAGELQKGNELALPSKYVNFLYLASHYEKLKGSPEDNEQKQLFVEQHKHYLDEIIEQISEFSKRVILADANLDKVLSAYNKHRDKPIREQAENIIHLFTLTNLGAPAAFKYFDTTIDRKRYTSTKEVLDATLIHQSITGLYETRIDLSQLGGDGGGGSGSSGGTLNIEDEHRLHETSKEPDVSLGSTWLSDFPQAWAETGGMGLAVRQAPLIIPLKATSTPVSIKQYPMSQEARLGIKPHIQRLLDQGILVPCQSPWNTPLLPVKKPGTNDYRPVQDLREVNKRVEDIHPTVPNPYNLLSGLPPSHQWYTVLDLKDAFFCLRLHPTSQPLFAFEWRDPEMGISGQLTWTRLPQGFKNSPTLFNEALHRDLADFRIQHPDLILLQYVDDLLLAATSELDCQQGTRALLQTLGNLGYRASAKKAQICQKQVKYLGYLLKEGQRWLTEARKETVMGQPTPKTPRQLREFLGTAGFCRLWIPGFAEMAAPLYPLTKPGTLFNWGPDQQKAYQEIKQALLTAPALGLPDLTKPFELFVDEKQGYAKGVLTQKLGPWRRPVAYLSKKLDPVAAGWPPCLRMVAAIAVLTKDAGKLTMGQPLVILAPHAVEALVKQPPDRWLSNARMTHYQALLLDTDRVQFGPVVALNPATLLPLPEEGLQHNCLDILAEAHGTRPDLTDQPLPDADHTWYTDGSSLLQEGQRKAGAAVTTETEVIWAKALPAGTSAQRAELIALTQALKMAEGKKLNVYTDSRYAFATAHIHGEIYRRRGWLTSEGKEIKNKDEILALLKALFLPKRLSIIHCPGHQKGHSAEARGNRMADQAARKAAITETPDTSTLLAGKRTADGSEFEKRTADGSEFESPKKKAKVE

SEQ ID NO: 3012 - protein, 2096 aa, synthetic construct; identical to SEQ ID NO: 2758
  source 1..2096: note = Description of Artificial Sequence: Synthetic polypeptide

SEQ ID NO: 3013 - protein, 2094 aa, synthetic construct
  source 1..2094: note = Description of Artificial Sequence: Synthetic polypeptide
MPAAKRVKLDGGDKKYSIGLDIGTNSVGWAVITDEYKVPSKKFKVLGNTDRHSIKKNLIGALLFDSGETAEATRLKRTARRRYTRRKNRICYLQEIFSNEMAKVDDSFFHRLEESFLVEEDKKHERHPIFGNIVDEVAYHEKYPTIYHLRKKLVDSTDKADLRLIYLALAHMIKFRGHFLIEGDLNPDNSDVDKLFIQLVQTYNQLFEENPINASGVDAKAILSARLSKSRRLENLIAQLPGEKKNGLFGNLIALSLGLTPNFKSNFDLAEDAKLQLSKDTYDDDLDNLLAQIGDQYADLFLAAKNLSDAILLSDILRVNTEITKAPLSASMIKRYDEHHQDLTLLKALVRQQLPEKYKEIFFDQSKNGYAGYIDGGASQEEFYKFIKPILEKMDGTEELLVKLNREDLLRKQRTFDNGSIPHQIHLGELHAILRRQEDFYPFLKDNREKIEKILTFRIPYYVGPLARGNSRFAWMTRKSEETITPWNFEEVVDKGASAQSFIERMTNFDKNLPNEKVLPKHSLLYEYFTVYNELTKVKYVTEGMRKPAFLSGEQKKAIVDLLFKTNRKVTVKQLKEDYFKKIECFDSVEISGVEDRFNASLGTYHDLLKIIKDKDFLDNEENEDILEDIVLTLTLFEDREMIEERLKTYAHLFDDKVMKQLKRRRYTGWGRLSRKLINGIRDKQSGKTILDFLKSDGFANRNFMQLIHDDSLTFKEDIQKAQVSGQGDSLHEHIANLAGSPAIKKGILQTVKVVDELVKVMGRHKPENIVIEMARENQTTQKGQKNSRERMKRIEEGIKELGSQILKEHPVENTQLQNEKLYLYYLQNGRDMYVDQELDINRLSDYDVDHIVPQSFLKDDSIDNKVLTRSDKARGKSDNVPSEEVVKKMKNYWRQLLNAKLITQRKFDNLTKAERGGLSELDKAGFIKRQLVETRQITKHVAQILDSRMNTKYDENDKLIREVKVITLKSKLVSDFRKDFQFYKVREINNYHHAHDAYLNAVVGTALIKKYPKLESEFVYGDYKVYDVRKMIAKSEQEIGKATAKYFFYSNIMNFFKTEITLANGEIRKRPLIETNGETGEIVWDKGRDFATVRKVLSMPQVNIVKKTEVQTGGFSKESILPKRNSDKLIARKKDWDPKKYGGFDSPTVAYSVLVVAKVEKGKSKKLKSVKELLGITIMERSSFEKNPIDFLEAKGYKEVKKDLIIKLPKYSLFELENGRKRMLASAGELQKGNELALPSKYVNFLYLASHYEKLKGSPEDNEQKQLFVEQHKHYLDEIIEQISEFSKRVILADANLDKVLSAYNKHRDKPIREQAENIIHLFTLTNLGAPAAFKYFDTTIDRKRYTSTKEVLDATLIHQSITGLYETRIDLSQLGGDGGPAPGGSGGGGGTLNIEDEHRLHETSKEPDVSLGSTWLSDFPQAWAETGGMGLAVRQAPLIIPLKATSTPVSIKQYPMSQEARLGIKPHIQRLLDQGILVPCQSPWNTPLLPVKKPGTNDYRPVQDLREVNKRVEDIHPTVPNPYNLLSGLPPSHQWYTVLDLKDAFFCLRLHPTSQPLFAFEWRDPEMGISGQLTWTRLPQGFKNSPTLFNEALHRDLADFRIQHPDLILLQYVDDLLLAATSELDCQQGTRALLQTLGNLGYRASAKKAQICQKQVKYLGYLLKEGQRWLTEARKETVMGQPTPKTPRQLREFLGTAGFCRLWIPGFAEMAAPLYPLTKPGTLFNWGPDQQKAYQEIKQALLTAPALGLPDLTKPFELFVDEKQGYAKGVLTQKLGPWRRPVAYLSKKLDPVAAGWPPCLRMVAAIAVLTKDAGKLTMGQPLVILAPHAVEALVKQPPDRWLSNARMTHYQALLLDTDRVQFGPVVALNPATLLPLPEEGLQHNCLDILAEAHGTRPDLTDQPLPDADHTWYTDGSSLLQEGQRKAGAAVTTETEVIWAKALPAGTSAQRAELIALTQALKMAEGKKLNVYTDSRYAFATAHIHGEIYRRRGWLTSEGKEIKNKDEILALLKALFLPKRLSIIHCPGHQKGHSAEARGNRMADQAARKAAITETPDTSTLLAGKRTADGSEFEKRTADGSEFESPKKKAKVE

SEQ ID NO: 3014 - protein, 2096 aa, synthetic construct; identical to SEQ ID NO: 2714
  source 1..2096: note = Description of Artificial Sequence: Synthetic polypeptide

SEQ ID NO: 3015 - protein, 2093 aa, synthetic construct; identical to SEQ ID NO: 2718
  source 1..2093: note = Description of Artificial Sequence: Synthetic polypeptide

SEQ ID NO: 3016 - protein, 2094 aa, synthetic construct; identical to SEQ ID NO: 2762
  source 1..2094: note = Description of Artificial Sequence: Synthetic polypeptide

SEQ ID NO: 3017 - protein, 2095 aa, synthetic construct; identical to SEQ ID NO: 2749
  source 1..2095: note = Description of Artificial Sequence: Synthetic polypeptide

SEQ ID NO: 3018 - protein, 2096 aa, synthetic construct; identical to SEQ ID NO: 2721
  source 1..2096: note = Description of Artificial Sequence: Synthetic polypeptide

SEQ ID NO: 3019 - protein, 2096 aa, synthetic construct; identical to SEQ ID NO: 2747
  source 1..2096: note = Description of Artificial Sequence: Synthetic polypeptide

SEQ ID NO: 3020 - protein, 2096 aa, synthetic construct; identical to SEQ ID NO: 2755
  source 1..2096: note = Description of Artificial Sequence: Synthetic polypeptide

SEQ ID NO: 3021 - protein, 2096 aa, synthetic construct
  source 1..2096: note = Description of Artificial Sequence: Synthetic polypeptide
MPAAKRVKLDGGDKKYSIGLDIGTNSVGWAVITDEYKVPSKKFKVLGNTDRHSIKKNLIGALLFDSGETAEATRLKRTARRRYTRRKNRICYLQEIFSNEMAKVDDSFFHRLEESFLVEEDKKHERHPIFGNIVDEVAYHEKYPTIYHLRKKLVDSTDKADLRLIYLALAHMIKFRGHFLIEGDLNPDNSDVDKLFIQLVQTYNQLFEENPINASGVDAKAILSARLSKSRRLENLIAQLPGEKKNGLFGNLIALSLGLTPNFKSNFDLAEDAKLQLSKDTYDDDLDNLLAQIGDQYADLFLAAKNLSDAILLSDILRVNTEITKAPLSASMIKRYDEHHQDLTLLKALVRQQLPEKYKEIFFDQSKNGYAGYIDGGASQEEFYKFIKPILEKMDGTEELLVKLNREDLLRKQRTFDNGSIPHQIHLGELHAILRRQEDFYPFLKDNREKIEKILTFRIPYYVGPLARGNSRFAWMTRKSEETITPWNFEEVVDKGASAQSFIERMTNFDKNLPNEKVLPKHSLLYEYFTVYNELTKVKYVTEGMRKPAFLSGEQKKAIVDLLFKTNRKVTVKQLKEDYFKKIECFDSVEISGVEDRFNASLGTYHDLLKIIKDKDFLDNEENEDILEDIVLTLTLFEDREMIEERLKTYAHLFDDKVMKQLKRRRYTGWGRLSRKLINGIRDKQSGKTILDFLKSDGFANRNFMQLIHDDSLTFKEDIQKAQVSGQGDSLHEHIANLAGSPAIKKGILQTVKVVDELVKVMGRHKPENIVIEMARENQTTQKGQKNSRERMKRIEEGIKELGSQILKEHPVENTQLQNEKLYLYYLQNGRDMYVDQELDINRLSDYDVDHIVPQSFLKDDSIDNKVLTRSDKARGKSDNVPSEEVVKKMKNYWRQLLNAKLITQRKFDNLTKAERGGLSELDKAGFIKRQLVETRQITKHVAQILDSRMNTKYDENDKLIREVKVITLKSKLVSDFRKDFQFYKVREINNYHHAHDAYLNAVVGTALIKKYPKLESEFVYGDYKVYDVRKMIAKSEQEIGKATAKYFFYSNIMNFFKTEITLANGEIRKRPLIETNGETGEIVWDKGRDFATVRKVLSMPQVNIVKKTEVQTGGFSKESILPKRNSDKLIARKKDWDPKKYGGFDSPTVAYSVLVVAKVEKGKSKKLKSVKELLGITIMERSSFEKNPIDFLEAKGYKEVKKDLIIKLPKYSLFELENGRKRMLASAGELQKGNELALPSKYVNFLYLASHYEKLKGSPEDNEQKQLFVEQHKHYLDEIIEQISEFSKRVILADANLDKVLSAYNKHRDKPIREQAENIIHLFTLTNLGAPAAFKYFDTTIDRKRYTSTKEVLDATLIHQSITGLYETRIDLSQLGGDGGEAAAKGSSGGSGGTLNIEDEHRLHETSKEPDVSLGSTWLSDFPQAWAETGGMGLAVRQAPLIIPLKATSTPVSIKQYPMSQEARLGIKPHIQRLLDQGILVPCQSPWNTPLLPVKKPGTNDYRPVQDLREVNKRVEDIHPTVPNPYNLLSGLPPSHQWYTVLDLKDAFFCLRLHPTSQPLFAFEWRDPEMGISGQLTWTRLPQGFKNSPTLFNEALHRDLADFRIQHPDLILLQYVDDLLLAATSELDCQQGTRALLQTLGNLGYRASAKKAQICQKQVKYLGYLLKEGQRWLTEARKETVMGQPTPKTPRQLREFLGTAGFCRLWIPGFAEMAAPLYPLTKPGTLFNWGPDQQKAYQEIKQALLTAPALGLPDLTKPFELFVDEKQGYAKGVLTQKLGPWRRPVAYLSKKLDPVAAGWPPCLRMVAAIAVLTKDAGKLTMGQPLVILAPHAVEALVKQPPDRWLSNARMTHYQALLLDTDRVQFGPVVALNPATLLPLPEEGLQHNCLDILAEAHGTRPDLTDQPLPDADHTWYTDGSSLLQEGQRKAGAAVTTETEVIWAKALPAGTSAQRAELIALTQALKMAEGKKLNVYTDSRYAFATAHIHGEIYRRRGWLTSEGKEIKNKDEILALLKALFLPKRLSIIHCPGHQKGHSAEARGNRMADQAARKAAITETPDTSTLLAGKRTADGSEFEKRTADGSEFESPKKKAKVE

SEQ ID NO: 3022 - protein, 2094 aa, synthetic construct
  source 1..2094: note = Description of Artificial Sequence: Synthetic polypeptide
MPAAKRVKLDGGDKKYSIGLDIGTNSVGWAVITDEYKVPSKKFKVLGNTDRHSIKKNLIGALLFDSGETAEATRLKRTARRRYTRRKNRICYLQEIFSNEMAKVDDSFFHRLEESFLVEEDKKHERHPIFGNIVDEVAYHEKYPTIYHLRKKLVDSTDKADLRLIYLALAHMIKFRGHFLIEGDLNPDNSDVDKLFIQLVQTYNQLFEENPINASGVDAKAILSARLSKSRRLENLIAQLPGEKKNGLFGNLIALSLGLTPNFKSNFDLAEDAKLQLSKDTYDDDLDNLLAQIGDQYADLFLAAKNLSDAILLSDILRVNTEITKAPLSASMIKRYDEHHQDLTLLKALVRQQLPEKYKEIFFDQSKNGYAGYIDGGASQEEFYKFIKPILEKMDGTEELLVKLNREDLLRKQRTFDNGSIPHQIHLGELHAILRRQEDFYPFLKDNREKIEKILTFRIPYYVGPLARGNSRFAWMTRKSEETITPWNFEEVVDKGASAQSFIERMTNFDKNLPNEKVLPKHSLLYEYFTVYNELTKVKYVTEGMRKPAFLSGEQKKAIVDLLFKTNRKVTVKQLKEDYFKKIECFDSVEISGVEDRFNASLGTYHDLLKIIKDKDFLDNEENEDILEDIVLTLTLFEDREMIEERLKTYAHLFDDKVMKQLKRRRYTGWGRLSRKLINGIRDKQSGKTILDFLKSDGFANRNFMQLIHDDSLTFKEDIQKAQVSGQGDSLHEHIANLAGSPAIKKGILQTVKVVDELVKVMGRHKPENIVIEMARENQTTQKGQKNSRERMKRIEEGIKELGSQILKEHPVENTQLQNEKLYLYYLQNGRDMYVDQELDINRLSDYDVDHIVPQSFLKDDSIDNKVLTRSDKARGKSDNVPSEEVVKKMKNYWRQLLNAKLITQRKFDNLTKAERGGLSELDKAGFIKRQLVETRQITKHVAQILDSRMNTKYDENDKLIREVKVITLKSKLVSDFRKDFQFYKVREINNYHHAHDAYLNAVVGTALIKKYPKLESEFVYGDYKVYDVRKMIAKSEQEIGKATAKYFFYSNIMNFFKTEITLANGEIRKRPLIETNGETGEIVWDKGRDFATVRKVLSMPQVNIVKKTEVQTGGFSKESILPKRNSDKLIARKKDWDPKKYGGFDSPTVAYSVLVVAKVEKGKSKKLKSVKELLGITIMERSSFEKNPIDFLEAKGYKEVKKDLIIKLPKYSLFELENGRKRMLASAGELQKGNELALPSKYVNFLYLASHYEKLKGSPEDNEQKQLFVEQHKHYLDEIIEQISEFSKRVILADANLDKVLSAYNKHRDKPIREQAENIIHLFTLTNLGAPAAFKYFDTTIDRKRYTSTKEVLDATLIHQSITGLYETRIDLSQLGGDGGGGGGSSGGSGGTLNIEDEHRLHETSKEPDVSLGSTWLSDFPQAWAETGGMGLAVRQAPLIIPLKATSTPVSIKQYPMSQEARLGIKPHIQRLLDQGILVPCQSPWNTPLLPVKKPGTNDYRPVQDLREVNKRVEDIHPTVPNPYNLLSGLPPSHQWYTVLDLKDAFFCLRLHPTSQPLFAFEWRDPEMGISGQLTWTRLPQGFKNSPTLFNEALHRDLADFRIQHPDLILLQYVDDLLLAATSELDCQQGTRALLQTLGNLGYRASAKKAQICQKQVKYLGYLLKEGQRWLTEARKETVMGQPTPKTPRQLREFLGTAGFCRLWIPGFAEMAAPLYPLTKPGTLFNWGPDQQKAYQEIKQALLTAPALGLPDLTKPFELFVDEKQGYAKGVLTQKLGPWRRPVAYLSKKLDPVAAGWPPCLRMVAAIAVLTKDAGKLTMGQPLVILAPHAVEALVKQPPDRWLSNARMTHYQALLLDTDRVQFGPVVALNPATLLPLPEEGLQHNCLDILAEAHGTRPDLTDQPLPDADHTWYTDGSSLLQEGQRKAGAAVTTETEVIWAKALPAGTSAQRAELIALTQALKMAEGKKLNVYTDSRYAFATAHIHGEIYRRRGWLTSEGKEIKNKDEILALLKALFLPKRLSIIHCPGHQKGHSAEARGNRMADQAARKAAITETPDTSTLLAGKRTADGSEFEKRTADGSEFESPKKKAKVE

SEQ ID NO: 3023 - protein, 2096 aa, synthetic construct; identical to SEQ ID NO: 2759
  source 1..2096: note = Description of Artificial Sequence: Synthetic polypeptide

SEQ ID NO: 3024 - protein, 2092 aa, synthetic construct
  source 1..2092: note = Description of Artificial Sequence: Synthetic polypeptide
MPAAKRVKLDGGDKKYSIGLDIGTNSVGWAVITDEYKVPSKKFKVLGNTDRHSIKKNLIGALLFDSGETAEATRLKRTARRRYTRRKNRICYLQEIFSNEMAKVDDSFFHRLEESFLVEEDKKHERHPIFGNIVDEVAYHEKYPTIYHLRKKLVDSTDKADLRLIYLALAHMIKFRGHFLIEGDLNPDNSDVDKLFIQLVQTYNQLFEENPINASGVDAKAILSARLSKSRRLENLIAQLPGEKKNGLFGNLIALSLGLTPNFKSNFDLAEDAKLQLSKDTYDDDLDNLLAQIGDQYADLFLAAKNLSDAILLSDILRVNTEITKAPLSASMIKRYDEHHQDLTLLKALVRQQLPEKYKEIFFDQSKNGYAGYIDGGASQEEFYKFIKPILEKMDGTEELLVKLNREDLLRKQRTFDNGSIPHQIHLGELHAILRRQEDFYPFLKDNREKIEKILTFRIPYYVGPLARGNSRFAWMTRKSEETITPWNFEEVVDKGASAQSFIERMTNFDKNLPNEKVLPKHSLLYEYFTVYNELTKVKYVTEGMRKPAFLSGEQKKAIVDLLFKTNRKVTVKQLKEDYFKKIECFDSVEISGVEDRFNASLGTYHDLLKIIKDKDFLDNEENEDILEDIVLTLTLFEDREMIEERLKTYAHLFDDKVMKQLKRRRYTGWGRLSRKLINGIRDKQSGKTILDFLKSDGFANRNFMQLIHDDSLTFKEDIQKAQVSGQGDSLHEHIANLAGSPAIKKGILQTVKVVDELVKVMGRHKPENIVIEMARENQTTQKGQKNSRERMKRIEEGIKELGSQILKEHPVENTQLQNEKLYLYYLQNGRDMYVDQELDINRLSDYDVDHIVPQSFLKDDSIDNKVLTRSDKARGKSDNVPSEEVVKKMKNYWRQLLNAKLITQRKFDNLTKAERGGLSELDKAGFIKRQLVETRQITKHVAQILDSRMNTKYDENDKLIREVKVITLKSKLVSDFRKDFQFYKVREINNYHHAHDAYLNAVVGTALIKKYPKLESEFVYGDYKVYDVRKMIAKSEQEIGKATAKYFFYSNIMNFFKTEITLANGEIRKRPLIETNGETGEIVWDKGRDFATVRKVLSMPQVNIVKKTEVQTGGFSKESILPKRNSDKLIARKKDWDPKKYGGFDSPTVAYSVLVVAKVEKGKSKKLKSVKELLGITIMERSSFEKNPIDFLEAKGYKEVKKDLIIKLPKYSLFELENGRKRMLASAGELQKGNELALPSKYVNFLYLASHYEKLKGSPEDNEQKQLFVEQHKHYLDEIIEQISEFSKRVILADANLDKVLSAYNKHRDKPIREQAENIIHLFTLTNLGAPAAFKYFDTTIDRKRYTSTKEVLDATLIHQSITGLYETRIDLSQLGGDGGGGGGGGGGGTLNIEDEHRLHETSKEPDVSLGSTWLSDFPQAWAETGGMGLAVRQAPLIIPLKATSTPVSIKQYPMSQEARLGIKPHIQRLLDQGILVPCQSPWNTPLLPVKKPGTNDYRPVQDLREVNKRVEDIHPTVPNPYNLLSGLPPSHQWYTVLDLKDAFFCLRLHPTSQPLFAFEWRDPEMGISGQLTWTRLPQGFKNSPTLFNEALHRDLADFRIQHPDLILLQYVDDLLLAATSELDCQQGTRALLQTLGNLGYRASAKKAQICQKQVKYLGYLLKEGQRWLTEARKETVMGQPTPKTPRQLREFLGTAGFCRLWIPGFAEMAAPLYPLTKPGTLFNWGPDQQKAYQEIKQALLTAPALGLPDLTKPFELFVDEKQGYAKGVLTQKLGPWRRPVAYLSKKLDPVAAGWPPCLRMVAAIAVLTKDAGKLTMGQPLVILAPHAVEALVKQPPDRWLSNARMTHYQALLLDTDRVQFGPVVALNPATLLPLPEEGLQHNCLDILAEAHGTRPDLTDQPLPDADHTWYTDGSSLLQEGQRKAGAAVTTETEVIWAKALPAGTSAQRAELIALTQALKMAEGKKLNVYTDSRYAFATAHIHGEIYRRRGWLTSEGKEIKNKDEILALLKALFLPKRLSIIHCPGHQKGHSAEARGNRMADQAARKAAITETPDTSTLLAGKRTADGSEFEKRTADGSEFESPKKKAKVE

SEQ ID NO: 3025 - protein, 2094 aa, synthetic construct; identical to SEQ ID NO: 2742
  source 1..2094: note = Description of Artificial Sequence: Synthetic polypeptide

SEQ ID NO: 3026 - protein, 2094 aa, synthetic construct; identical to SEQ ID NO: 2715
  source 1..2094: note = Description of Artificial Sequence: Synthetic polypeptide

SEQ ID NO: 3027 - protein, 2097 aa, synthetic construct; identical to SEQ ID NO: 2728
  source 1..2097: note = Description of Artificial Sequence: Synthetic polypeptide

SEQ ID NO: 3028 - protein, 2091 aa, synthetic construct; identical to SEQ ID NO: 2743
  source 1..2091: note = Description of Artificial Sequence: Synthetic polypeptide

SEQ ID NO: 3029 - protein, 2090 aa, synthetic construct
  source 1..2090: note = Description of Artificial Sequence: Synthetic polypeptide
MPAAKRVKLDGGDKKYSIGLDIGTNSVGWAVITDEYKVPSKKFKVLGNTDRHSIKKNLIGALLFDSGETAEATRLKRTARRRYTRRKNRICYLQEIFSNEMAKVDDSFFHRLEESFLVEEDKKHERHPIFGNIVDEVAYHEKYPTIYHLRKKLVDSTDKADLRLIYLALAHMIKFRGHFLIEGDLNPDNSDVDKLFIQLVQTYNQLFEENPINASGVDAKAILSARLSKSRRLENLIAQLPGEKKNGLFGNLIALSLGLTPNFKSNFDLAEDAKLQLSKDTYDDDLDNLLAQIGDQYADLFLAAKNLSDAILLSDILRVNTEITKAPLSASMIKRYDEHHQDLTLLKALVRQQLPEKYKEIFFDQSKNGYAGYIDGGASQEEFYKFIKPILEKMDGTEELLVKLNREDLLRKQRTFDNGSIPHQIHLGELHAILRRQEDFYPFLKDNREKIEKILTFRIPYYVGPLARGNSRFAWMTRKSEETITPWNFEEVVDKGASAQSFIERMTNFDKNLPNEKVLPKHSLLYEYFTVYNELTKVKYVTEGMRKPAFLSGEQKKAIVDLLFKTNRKVTVKQLKEDYFKKIECFDSVEISGVEDRFNASLGTYHDLLKIIKDKDFLDNEENEDILEDIVLTLTLFEDREMIEERLKTYAHLFDDKVMKQLKRRRYTGWGRLSRKLINGIRDKQSGKTILDFLKSDGFANRNFMQLIHDDSLTFKEDIQKAQVSGQGDSLHEHIANLAGSPAIKKGILQTVKVVDELVKVMGRHKPENIVIEMARENQTTQKGQKNSRERMKRIEEGIKELGSQILKEHPVENTQLQNEKLYLYYLQNGRDMYVDQELDINRLSDYDVDHIVPQSFLKDDSIDNKVLTRSDKARGKSDNVPSEEVVKKMKNYWRQLLNAKLITQRKFDNLTKAERGGLSELDKAGFIKRQLVETRQITKHVAQILDSRMNTKYDENDKLIREVKVITLKSKLVSDFRKDFQFYKVREINNYHHAHDAYLNAVVGTALIKKYPKLESEFVYGDYKVYDVRKMIAKSEQEIGKATAKYFFYSNIMNFFKTEITLANGEIRKRPLIETNGETGEIVWDKGRDFATVRKVLSMPQVNIVKKTEVQTGGFSKESILPKRNSDKLIARKKDWDPKKYGGFDSPTVAYSVLVVAKVEKGKSKKLKSVKELLGITIMERSSFEKNPIDFLEAKGYKEVKKDLIIKLPKYSLFELENGRKRMLASAGELQKGNELALPSKYVNFLYLASHYEKLKGSPEDNEQKQLFVEQHKHYLDEIIEQISEFSKRVILADANLDKVLSAYNKHRDKPIREQAENIIHLFTLTNLGAPAAFKYFDTTIDRKRYTSTKEVLDATLIHQSITGLYETRIDLSQLGGDGGPAPAPGGTLNIEDEHRLHETSKEPDVSLGSTWLSDFPQAWAETGGMGLAVRQAPLIIPLKATSTPVSIKQYPMSQEARLGIKPHIQRLLDQGILVPCQSPWNTPLLPVKKPGTNDYRPVQDLREVNKRVEDIHPTVPNPYNLLSGLPPSHQWYTVLDLKDAFFCLRLHPTSQPLFAFEWRDPEMGISGQLTWTRLPQGFKNSPTLFNEALHRDLADFRIQHPDLILLQYVDDLLLAATSELDCQQGTRALLQTLGNLGYRASAKKAQICQKQVKYLGYLLKEGQRWLTEARKETVMGQPTPKTPRQLREFLGTAGFCRLWIPGFAEMAAPLYPLTKPGTLFNWGPDQQKAYQEIKQALLTAPALGLPDLTKPFELFVDEKQGYAKGVLTQKLGPWRRPVAYLSKKLDPVAAGWPPCLRMVAAIAVLTKDAGKLTMGQPLVILAPHAVEALVKQPPDRWLSNARMTHYQALLLDTDRVQFGPVVALNPATLLPLPEEGLQHNCLDILAEAHGTRPDLTDQPLPDADHTWYTDGSSLLQEGQRKAGAAVTTETEVIWAKALPAGTSAQRAELIALTQALKMAEGKKLNVYTDSRYAFATAHIHGEIYRRRGWLTSEGKEIKNKDEILALLKALFLPKRLSIIHCPGHQKGHSAEARGNRMADQAARKAAITETPDTSTLLAGKRTADGSEFEKRTADGSEFESPKKKAKVE

SEQ ID NO: 3030 - protein, 2091 aa, synthetic construct; identical to SEQ ID NO: 2750
  source 1..2091: note = Description of Artificial Sequence: Synthetic polypeptide

SEQ ID NO: 3031 - protein, 2094 aa, synthetic construct; identical to SEQ ID NO: 2768
  source 1..2094: note = Description of Artificial Sequence: Synthetic polypeptide

SEQ ID NO: 3032 - protein, 2094 aa, synthetic construct; identical to SEQ ID NO: 2770
  source 1..2094: note = Description of Artificial Sequence: Synthetic polypeptide

SEQ ID NO: 3033 - protein, 2091 aa, synthetic construct; identical to SEQ ID NO: 2779
  source 1..2091: note = Description of Artificial Sequence: Synthetic polypeptide

SEQ ID NO: 3034 - protein, 2093 aa, synthetic construct; identical to SEQ ID NO: 2774
  source 1..2093: note = Description of Artificial Sequence: Synthetic polypeptide

SEQ ID NO: 3035 - protein, 2103 aa, synthetic construct
  source 1..2103: note = Description of Artificial Sequence: Synthetic polypeptide
MPAAKRVKLDGGDKKYSIGLDIGTNSVGWAVITDEYKVPSKKFKVLGNTDRHSIKKNLIGALLFDSGETAEATRLKRTARRRYTRRKNRICYLQEIFSNEMAKVDDSFFHRLEESFLVEEDKKHERHPIFGNIVDEVAYHEKYPTIYHLRKKLVDSTDKADLRLIYLALAHMIKFRGHFLIEGDLNPDNSDVDKLFIQLVQTYNQLFEENPINASGVDAKAILSARLSKSRRLENLIAQLPGEKKNGLFGNLIALSLGLTPNFKSNFDLAEDAKLQLSKDTYDDDLDNLLAQIGDQYADLFLAAKNLSDAILLSDILRVNTEITKAPLSASMIKRYDEHHQDLTLLKALVRQQLPEKYKEIFFDQSKNGYAGYIDGGASQEEFYKFIKPILEKMDGTEELLVKLNREDLLRKQRTFDNGSIPHQIHLGELHAILRRQEDFYPFLKDNREKIEKILTFRIPYYVGPLARGNSRFAWMTRKSEETITPWNFEEVVDKGASAQSFIERMTNFDKNLPNEKVLPKHSLLYEYFTVYNELTKVKYVTEGMRKPAFLSGEQKKAIVDLLFKTNRKVTVKQLKEDYFKKIECFDSVEISGVEDRFNASLGTYHDLLKIIKDKDFLDNEENEDILEDIVLTLTLFEDREMIEERLKTYAHLFDDKVMKQLKRRRYTGWGRLSRKLINGIRDKQSGKTILDFLKSDGFANRNFMQLIHDDSLTFKEDIQKAQVSGQGDSLHEHIANLAGSPAIKKGILQTVKVVDELVKVMGRHKPENIVIEMARENQTTQKGQKNSRERMKRIEEGIKELGSQILKEHPVENTQLQNEKLYLYYLQNGRDMYVDQELDINRLSDYDVDHIVPQSFLKDDSIDNKVLTRSDKARGKSDNVPSEEVVKKMKNYWRQLLNAKLITQRKFDNLTKAERGGLSELDKAGFIKRQLVETRQITKHVAQILDSRMNTKYDENDKLIREVKVITLKSKLVSDFRKDFQFYKVREINNYHHAHDAYLNAVVGTALIKKYPKLESEFVYGDYKVYDVRKMIAKSEQEIGKATAKYFFYSNIMNFFKTEITLANGEIRKRPLIETNGETGEIVWDKGRDFATVRKVLSMPQVNIVKKTEVQTGGFSKESILPKRNSDKLIARKKDWDPKKYGGFDSPTVAYSVLVVAKVEKGKSKKLKSVKELLGITIMERSSFEKNPIDFLEAKGYKEVKKDLIIKLPKYSLFELENGRKRMLASAGELQKGNELALPSKYVNFLYLASHYEKLKGSPEDNEQKQLFVEQHKHYLDEIIEQISEFSKRVILADANLDKVLSAYNKHRDKPIREQAENIIHLFTLTNLGAPAAFKYFDTTIDRKRYTSTKEVLDATLIHQSITGLYETRIDLSQLGGDGGGGSGGSGGSGGSGGSGGSGGTLNIEDEHRLHETSKEPDVSLGSTWLSDFPQAWAETGGMGLAVRQAPLIIPLKATSTPVSIKQYPMSQEARLGIKPHIQRLLDQGILVPCQSPWNTPLLPVKKPGTNDYRPVQDLREVNKRVEDIHPTVPNPYNLLSGLPPSHQWYTVLDLKDAFFCLRLHPTSQPLFAFEWRDPEMGISGQLTWTRLPQGFKNSPTLFNEALHRDLADFRIQHPDLILLQYVDDLLLAATSELDCQQGTRALLQTLGNLGYRASAKKAQICQKQVKYLGYLLKEGQRWLTEARKETVMGQPTPKTPRQLREFLGKAGFCRLFIPGFAEMAAPLYPLTKPGTLFNWGPDQQKAYQEIKQALLTAPALGLPDLTKPFELFVDEKQGYAKGVLTQKLGPWRRPVAYLSKKLDPVAAGWPPCLRMVAAIAVLTKDAGKLTMGQPLVILAPHAVEALVKQPPDRWLSNARMTHYQALLLDTDRVQFGPVVALNPATLLPLPEEGLQHNCLDILAEAHGTRPDLTDQPLPDADHTWYTDGSSLLQEGQRKAGAAVTTETEVIWAKALPAGTSAQRAELIALTQALKMAEGKKLNVYTDSRYAFATAHIHGEIYRRRGWLTSEGKEIKNKDEILALLKALFLPKRLSIIHCPGHQKGHSAEARGNRMADQAARKAAITETPDTSTLLAGKRTADGSEFEKRTADGSEFESPKKKAKVE

SEQ ID NO: 3036 - protein, 2105 aa, synthetic construct; identical to SEQ ID NO: 2844
  source 1..2105: note = Description of Artificial Sequence: Synthetic polypeptide

SEQ ID NO: 3037 - protein, 2088 aa, synthetic construct; identical to SEQ ID NO: 2812
  source 1..2088: note = Description of Artificial Sequence: Synthetic polypeptide

SEQ ID NO: 3038 - protein, 2103 aa, synthetic construct; identical to SEQ ID NO: 2816
  source 1..2103: note = Description of Artificial Sequence: Synthetic polypeptide

SEQ ID NO: 3039 - protein, 2097 aa, synthetic construct; identical to SEQ ID NO: 2795
  source 1..2097: note = Description of Artificial Sequence: Synthetic polypeptide

SEQ ID NO: 3040 - protein, 2096 aa, synthetic construct; identical to SEQ ID NO: 2831
  source 1..2096: note = Description of Artificial Sequence: Synthetic polypeptide

SEQ ID NO: 3041 - protein, 2095 aa, synthetic construct; identical to SEQ ID NO: 2845
  source 1..2095: note = Description of Artificial Sequence: Synthetic polypeptide

SEQ ID NO: 3042 - protein, 2094 aa, synthetic construct; identical to SEQ ID NO: 2818
  source 1..2094: note = Description of Artificial Sequence: Synthetic polypeptide

SEQ ID NO: 3043 - protein, 2110 aa, synthetic construct; identical to SEQ ID NO: 2803
  source 1..2110: note = Description of Artificial Sequence: Synthetic polypeptide

SEQ ID NO: 3044 - protein, 2091 aa, synthetic construct
  source 1..2091: note = Description of Artificial Sequence: Synthetic polypeptide
MPAAKRVKLDGGDKKYSIGLDIGTNSVGWAVITDEYKVPSKKFKVLGNTDRHSIKKNLIGALLFDSGETAEATRLKRTARRRYTRRKNRICYLQEIFSNEMAKVDDSFFHRLEESFLVEEDKKHERHPIFGNIVDEVAYHEKYPTIYHLRKKLVDSTDKADLRLIYLALAHMIKFRGHFLIEGDLNPDNSDVDKLFIQLVQTYNQLFEENPINASGVDAKAILSARLSKSRRLENLIAQLPGEKKNGLFGNLIALSLGLTPNFKSNFDLAEDAKLQLSKDTYDDDLDNLLAQIGDQYADLFLAAKNLSDAILLSDILRVNTEITKAPLSASMIKRYDEHHQDLTLLKALVRQQLPEKYKEIFFDQSKNGYAGYIDGGASQEEFYKFIKPILEKMDGTEELLVKLNREDLLRKQRTFDNGSIPHQIHLGELHAILRRQEDFYPFLKDNREKIEKILTFRIPYYVGPLARGNSRFAWMTRKSEETITPWNFEEVVDKGASAQSFIERMTNFDKNLPNEKVLPKHSLLYEYFTVYNELTKVKYVTEGMRKPAFLSGEQKKAIVDLLFKTNRKVTVKQLKEDYFKKIECFDSVEISGVEDRFNASLGTYHDLLKIIKDKDFLDNEENEDILEDIVLTLTLFEDREMIEERLKTYAHLFDDKVMKQLKRRRYTGWGRLSRKLINGIRDKQSGKTILDFLKSDGFANRNFMQLIHDDSLTFKEDIQKAQVSGQGDSLHEHIANLAGSPAIKKGILQTVKVVDELVKVMGRHKPENIVIEMARENQTTQKGQKNSRERMKRIEEGIKELGSQILKEHPVENTQLQNEKLYLYYLQNGRDMYVDQELDINRLSDYDVDHIVPQSFLKDDSIDNKVLTRSDKARGKSDNVPSEEVVKKMKNYWRQLLNAKLITQRKFDNLTKAERGGLSELDKAGFIKRQLVETRQITKHVAQILDSRMNTKYDENDKLIREVKVITLKSKLVSDFRKDFQFYKVREINNYHHAHDAYLNAVVGTALIKKYPKLESEFVYGDYKVYDVRKMIAKSEQEIGKATAKYFFYSNIMNFFKTEITLANGEIRKRPLIETNGETGEIVWDKGRDFATVRKVLSMPQVNIVKKTEVQTGGFSKESILPKRNSDKLIARKKDWDPKKYGGFDSPTVAYSVLVVAKVEKGKSKKLKSVKELLGITIMERSSFEKNPIDFLEAKGYKEVKKDLIIKLPKYSLFELENGRKRMLASAGELQKGNELALPSKYVNFLYLASHYEKLKGSPEDNEQKQLFVEQHKHYLDEIIEQISEFSKRVILADANLDKVLSAYNKHRDKPIREQAENIIHLFTLTNLGAPAAFKYFDTTIDRKRYTSTKEVLDATLIHQSITGLYETRIDLSQLGGDGGGGGGGGGGTLNIEDEHRLHETSKEPDVSLGSTWLSDFPQAWAETGGMGLAVRQAPLIIPLKATSTPVSIKQYPMSQEARLGIKPHIQRLLDQGILVPCQSPWNTPLLPVKKPGTNDYRPVQDLREVNKRVEDIHPTVPNPYNLLSGLPPSHQWYTVLDLKDAFFCLRLHPTSQPLFAFEWRDPEMGISGQLTWTRLPQGFKNSPTLFNEALHRDLADFRIQHPDLILLQYVDDLLLAATSELDCQQGTRALLQTLGNLGYRASAKKAQICQKQVKYLGYLLKEGQRWLTEARKETVMGQPTPKTPRQLREFLGKAGFCRLFIPGFAEMAAPLYPLTKPGTLFNWGPDQQKAYQEIKQALLTAPALGLPDLTKPFELFVDEKQGYAKGVLTQKLGPWRRPVAYLSKKLDPVAAGWPPCLRMVAAIAVLTKDAGKLTMGQPLVILAPHAVEALVKQPPDRWLSNARMTHYQALLLDTDRVQFGPVVALNPATLLPLPEEGLQHNCLDILAEAHGTRPDLTDQPLPDADHTWYTDGSSLLQEGQRKAGAAVTTETEVIWAKALPAGTSAQRAELIALTQALKMAEGKKLNVYTDSRYAFATAHIHGEIYRRRGWLTSEGKEIKNKDEILALLKALFLPKRLSIIHCPGHQKGHSAEARGNRMADQAARKAAITETPDTSTLLAGKRTADGSEFEKRTADGSEFESPKKKAKVE

SEQ ID NO: 3045 - protein, 2096 aa, synthetic construct
  source 1..2096: note = Description of Artificial Sequence: Synthetic polypeptide
MPAAKRVKLDGGDKKYSIGLDIGTNSVGWAVITDEYKVPSKKFKVLGNTDRHSIKKNLIGALLFDSGETAEATRLKRTARRRYTRRKNRICYLQEIFSNEMAKVDDSFFHRLEESFLVEEDKKHERHPIFGNIVDEVAYHEKYPTIYHLRKKLVDSTDKADLRLIYLALAHMIKFRGHFLIEGDLNPDNSDVDKLFIQLVQTYNQLFEENPINASGVDAKAILSARLSKSRRLENLIAQLPGEKKNGLFGNLIALSLGLTPNFKSNFDLAEDAKLQLSKDTYDDDLDNLLAQIGDQYADLFLAAKNLSDAILLSDILRVNTEITKAPLSASMIKRYDEHHQDLTLLKALVRQQLPEKYKEIFFDQSKNGYAGYIDGGASQEEFYKFIKPILEKMDGTEELLVKLNREDLLRKQRTFDNGSIPHQIHLGELHAILRRQEDFYPFLKDNREKIEKILTFRIPYYVGPLARGNSRFAWMTRKSEETITPWNFEEVVDKGASAQSFIERMTNFDKNLPNEKVLPKHSLLYEYFTVYNELTKVKYVTEGMRKPAFLSGEQKKAIVDLLFKTNRKVTVKQLKEDYFKKIECFDSVEISGVEDRFNASLGTYHDLLKIIKDKDFLDNEENEDILEDIVLTLTLFEDREMIEERLKTYAHLFDDKVMKQLKRRRYTGWGRLSRKLINGIRDKQSGKTILDFLKSDGFANRNFMQLIHDDSLTFKEDIQKAQVSGQGDSLHEHIANLAGSPAIKKGILQTVKVVDELVKVMGRHKPENIVIEMARENQTTQKGQKNSRERMKRIEEGIKELGSQILKEHPVENTQLQNEKLYLYYLQNGRDMYVDQELDINRLSDYDVDHIVPQSFLKDDSIDNKVLTRSDKARGKSDNVPSEEVVKKMKNYWRQLLNAKLITQRKFDNLTKAERGGLSELDKAGFIKRQLVETRQITKHVAQILDSRMNTKYDENDKLIREVKVITLKSKLVSDFRKDFQFYKVREINNYHHAHDAYLNAVVGTALIKKYPKLESEFVYGDYKVYDVRKMIAKSEQEIGKATAKYFFYSNIMNFFKTEITLANGEIRKRPLIETNGETGEIVWDKGRDFATVRKVLSMPQVNIVKKTEVQTGGFSKESILPKRNSDKLIARKKDWDPKKYGGFDSPTVAYSVLVVAKVEKGKSKKLKSVKELLGITIMERSSFEKNPIDFLEAKGYKEVKKDLIIKLPKYSLFELENGRKRMLASAGELQKGNELALPSKYVNFLYLASHYEKLKGSPEDNEQKQLFVEQHKHYLDEIIEQISEFSKRVILADANLDKVLSAYNKHRDKPIREQAENIIHLFTLTNLGAPAAFKYFDTTIDRKRYTSTKEVLDATLIHQSITGLYETRIDLSQLGGDGGGGGEAAAKGGSGGTLNIEDEHRLHETSKEPDVSLGSTWLSDFPQAWAETGGMGLAVRQAPLIIPLKATSTPVSIKQYPMSQEARLGIKPHIQRLLDQGILVPCQSPWNTPLLPVKKPGTNDYRPVQDLREVNKRVEDIHPTVPNPYNLLSGLPPSHQWYTVLDLKDAFFCLRLHPTSQPLFAFEWRDPEMGISGQLTWTRLPQGFKNSPTLFNEALHRDLADFRIQHPDLILLQYVDDLLLAATSELDCQQGTRALLQTLGNLGYRASAKKAQICQKQVKYLGYLLKEGQRWLTEARKETVMGQPTPKTPRQLREFLGKAGFCRLFIPGFAEMAAPLYPLTKPGTLFNWGPDQQKAYQEIKQALLTAPALGLPDLTKPFELFVDEKQGYAKGVLTQKLGPWRRPVAYLSKKLDPVAAGWPPCLRMVAAIAVLTKDAGKLTMGQPLVILAPHAVEALVKQPPDRWLSNARMTHYQALLLDTDRVQFGPVVALNPATLLPLPEEGLQHNCLDILAEAHGTRPDLTDQPLPDADHTWYTDGSSLLQEGQRKAGAAVTTETEVIWAKALPAGTSAQRAELIALTQALKMAEGKKLNVYTDSRYAFATAHIHGEIYRRRGWLTSEGKEIKNKDEILALLKALFLPKRLSIIHCPGHQKGHSAEARGNRMADQAARKAAITETPDTSTLLAGKRTADGSEFEKRTADGSEFESPKKKAKVE

SEQ ID NO: 3046 - protein, 2096 aa, synthetic construct; identical to SEQ ID NO: 2829
  source 1..2096: note = Description of Artificial Sequence: Synthetic polypeptide

SEQ ID NO: 3047 - protein, 2094 aa, synthetic construct
  source 1..2094: note = Description of Artificial Sequence: Synthetic polypeptide
MPAAKRVKLDGGDKKYSIGLDIGTNSVGWAVITDEYKVPSKKFKVLGNTDRHSIKKNLIGALLFDSGETAEATRLKRTARRRYTRRKNRICYLQEIFSNEMAKVDDSFFHRLEESFLVEEDKKHERHPIFGNIVDEVAYHEKYPTIYHLRKKLVDSTDKADLRLIYLALAHMIKFRGHFLIEGDLNPDNSDVDKLFIQLVQTYNQLFEENPINASGVDAKAILSARLSKSRRLENLIAQLPGEKKNGLFGNLIALSLGLTPNFKSNFDLAEDAKLQLSKDTYDDDLDNLLAQIGDQYADLFLAAKNLSDAILLSDILRVNTEITKAPLSASMIKRYDEHHQDLTLLKALVRQQLPEKYKEIFFDQSKNGYAGYIDGGASQEEFYKFIKPILEKMDGTEELLVKLNREDLLRKQRTFDNGSIPHQIHLGELHAILRRQEDFYPFLKDNREKIEKILTFRIPYYVGPLARGNSRFAWMTRKSEETITPWNFEEVVDKGASAQSFIERMTNFDKNLPNEKVLPKHSLLYEYFTVYNELTKVKYVTEGMRKPAFLSGEQKKAIVDLLFKTNRKVTVKQLKEDYFKKIECFDSVEISGVEDRFNASLGTYHDLLKIIKDKDFLDNEENEDILEDIVLTLTLFEDREMIEERLKTYAHLFDDKVMKQLKRRRYTGWGRLSRKLINGIRDKQSGKTILDFLKSDGFANRNFMQLIHDDSLTFKEDIQKAQVSGQGDSLHEHIANLAGSPAIKKGILQTVKVVDELVKVMGRHKPENIVIEMARENQTTQKGQKNSRERMKRIEEGIKELGSQILKEHPVENTQLQNEKLYLYYLQNGRDMYVDQELDINRLSDYDVDHIVPQSFLKDDSIDNKVLTRSDKARGKSDNVPSEEVVKKMKNYWRQLLNAKLITQRKFDNLTKAERGGLSELDKAGFIKRQLVETRQITKHVAQILDSRMNTKYDENDKLIREVKVITLKSKLVSDFRKDFQFYKVREINNYHHAHDAYLNAVVGTALIKKYPKLESEFVYGDYKVYDVRKMIAKSEQEIGKATAKYFFYSNIMNFFKTEITLANGEIRKRPLIETNGETGEIVWDKGRDFATVRKVLSMPQVNIVKKTEVQTGGFSKESILPKRNSDKLIARKKDWDPKKYGGFDSPTVAYSVLVVAKVEKGKSKKLKSVKELLGITIMERSSFEKNPIDFLEAKGYKEVKKDLIIKLPKYSLFELENGRKRMLASAGELQKGNELALPSKYVNFLYLASHYEKLKGSPEDNEQKQLFVEQHKHYLDEIIEQISEFSKRVILADANLDKVLSAYNKHRDKPIREQAENIIHLFTLTNLGAPAAFKYFDTTIDRKRYTSTKEVLDATLIHQSITGLYETRIDLSQLGGDGGGSSGGGGGSGGTLNIEDEHRLHETSKEPDVSLGSTWLSDFPQAWAETGGMGLAVRQAPLIIPLKATSTPVSIKQYPMSQEARLGIKPHIQRLLDQGILVPCQSPWNTPLLPVKKPGTNDYRPVQDLREVNKRVEDIHPTVPNPYNLLSGLPPSHQWYTVLDLKDAFFCLRLHPTSQPLFAFEWRDPEMGISGQLTWTRLPQGFKNSPTLFNEALHRDLADFRIQHPDLILLQYVDDLLLAATSELDCQQGTRALLQTLGNLGYRASAKKAQICQKQVKYLGYLLKEGQRWLTEARKETVMGQPTPKTPRQLREFLGKAGFCRLFIPGFAEMAAPLYPLTKPGTLFNWGPDQQKAYQEIKQALLTAPALGLPDLTKPFELFVDEKQGYAKGVLTQKLGPWRRPVAYLSKKLDPVAAGWPPCLRMVAAIAVLTKDAGKLTMGQPLVILAPHAVEALVKQPPDRWLSNARMTHYQALLLDTDRVQFGPVVALNPATLLPLPEEGLQHNCLDILAEAHGTRPDLTDQPLPDADHTWYTDGSSLLQEGQRKAGAAVTTETEVIWAKALPAGTSAQRAELIALTQALKMAEGKKLNVYTDSRYAFATAHIHGEIYRRRGWLTSEGKEIKNKDEILALLKALFLPKRLSIIHCPGHQKGHSAEARGNRMADQAARKAAITETPDTSTLLAGKRTADGSEFEKRTADGSEFESPKKKAKVE

SEQ ID NO: 3048 - protein, 2094 aa, synthetic construct; identical to SEQ ID NO: 2852
  source 1..2094: note = Description of Artificial Sequence: Synthetic polypeptide

SEQ ID NO: 3049 - protein, 2097 aa, synthetic construct; identical to SEQ ID NO: 2814
  source 1..2097: note = Description of Artificial Sequence: Synthetic polypeptide

SEQ ID NO: 3050 - protein, 2096 aa, synthetic construct
  source 1..2096: note = Description of Artificial Sequence: Synthetic polypeptide
MPAAKRVKLDGGDKKYSIGLDIGTNSVGWAVITDEYKVPSKKFKVLGNTDRHSIKKNLIGALLFDSGETAEATRLKRTARRRYTRRKNRICYLQEIFSNEMAKVDDSFFHRLEESFLVEEDKKHERHPIFGNIVDEVAYHEKYPTIYHLRKKLVDSTDKADLRLIYLALAHMIKFRGHFLIEGDLNPDNSDVDKLFIQLVQTYNQLFEENPINASGVDAKAILSARLSKSRRLENLIAQLPGEKKNGLFGNLIALSLGLTPNFKSNFDLAEDAKLQLSKDTYDDDLDNLLAQIGDQYADLFLAAKNLSDAILLSDILRVNTEITKAPLSASMIKRYDEHHQDLTLLKALVRQQLPEKYKEIFFDQSKNGYAGYIDGGASQEEFYKFIKPILEKMDGTEELLVKLNREDLLRKQRTFDNGSIPHQIHLGELHAILRRQEDFYPFLKDNREKIEKILTFRIPYYVGPLARGNSRFAWMTRKSEETITPWNFEEVVDKGASAQSFIERMTNFDKNLPNEKVLPKHSLLYEYFTVYNELTKVKYVTEGMRKPAFLSGEQKKAIVDLLFKTNRKVTVKQLKEDYFKKIECFDSVEISGVEDRFNASLGTYHDLLKIIKDKDFLDNEENEDILEDIVLTLTLFEDREMIEERLKTYAHLFDDKVMKQLKRRRYTGWGRLSRKLINGIRDKQSGKTILDFLKSDGFANRNFMQLIHDDSLTFKEDIQKAQVSGQGDSLHEHIANLAGSPAIKKGILQTVKVVDELVKVMGRHKPENIVIEMARENQTTQKGQKNSRERMKRIEEGIKELGSQILKEHPVENTQLQNEKLYLYYLQNGRDMYVDQELDINRLSDYDVDHIVPQSFLKDDSIDNKVLTRSDKARGKSDNVPSEEVVKKMKNYWRQLLNAKLITQRKFDNLTKAERGGLSELDKAGFIKRQLVETRQITKHVAQILDSRMNTKYDENDKLIREVKVITLKSKLVSDFRKDFQFYKVREINNYHHAHDAYLNAVVGTALIKKYPKLESEFVYGDYKVYDVRKMIAKSEQEIGKATAKYFFYSNIMNFFKTEITLANGEIRKRPLIETNGETGEIVWDKGRDFATVRKVLSMPQVNIVKKTEVQTGGFSKESILPKRNSDKLIARKKDWDPKKYGGFDSPTVAYSVLVVAKVEKGKSKKLKSVKELLGITIMERSSFEKNPIDFLEAKGYKEVKKDLIIKLPKYSLFELENGRKRMLASAGELQKGNELALPSKYVNFLYLASHYEKLKGSPEDNEQKQLFVEQHKHYLDEIIEQISEFSKRVILADANLDKVLSAYNKHRDKPIREQAENIIHLFTLTNLGAPAAFKYFDTTIDRKRYTSTKEVLDATLIHQSITGLYETRIDLSQLGGDGGGGGEAAAKGSSGGTLNIEDEHRLHETSKEPDVSLGSTWLSDFPQAWAETGGMGLAVRQAPLIIPLKATSTPVSIKQYPMSQEARLGIKPHIQRLLDQGILVPCQSPWNTPLLPVKKPGTNDYRPVQDLREVNKRVEDIHPTVPNPYNLLSGLPPSHQWYTVLDLKDAFFCLRLHPTSQPLFAFEWRDPEMGISGQLTWTRLPQGFKNSPTLFNEALHRDLADFRIQHPDLILLQYVDDLLLAATSELDCQQGTRALLQTLGNLGYRASAKKAQICQKQVKYLGYLLKEGQRWLTEARKETVMGQPTPKTPRQLREFLGKAGFCRLFIPGFAEMAAPLYPLTKPGTLFNWGPDQQKAYQEIKQALLTAPALGLPDLTKPFELFVDEKQGYAKGVLTQKLGPWRRPVAYLSKKLDPVAAGWPPCLRMVAAIAVLTKDAGKLTMGQPLVILAPHAVEALVKQPPDRWLSNARMTHYQALLLDTDRVQFGPVVALNPATLLPLPEEGLQHNCLDILAEAHGTRPDLTDQPLPDADHTWYTDGSSLLQEGQRKAGAAVTTETEVIWAKALPAGTSAQRAELIALTQALKMAEGKKLNVYTDSRYAFATAHIHGEIYRRRGWLTSEGKEIKNKDEILALLKALFLPKRLSIIHCPGHQKGHSAEARGNRMADQAARKAAITETPDTSTLLAGKRTADGSEFEKRTADGSEFESPKKKAKVE

SEQ ID NO: 3051 - protein, 2096 aa, synthetic construct; identical to SEQ ID NO: 2785
  source 1..2096: note = Description of Artificial Sequence: Synthetic polypeptide

SEQ ID NO: 3052 - protein, 2096 aa, synthetic construct; identical to SEQ ID NO: 2822
  source 1..2096: note = Description of Artificial Sequence: Synthetic polypeptide

SEQ ID NO: 3053 - protein, 2096 aa, synthetic construct; identical to SEQ ID NO: 2817
  source 1..2096: note = Description of Artificial Sequence: Synthetic polypeptide

SEQ ID NO: 3054 - protein, 2096 aa, synthetic construct; identical to SEQ ID NO: 2851
  source 1..2096: note = Description of Artificial Sequence: Synthetic polypeptide

SEQ ID NO: 3055 - protein, 2091 aa, synthetic construct
  source 1..2091: note = Description of Artificial Sequence: Synthetic polypeptide
MPAAKRVKLDGGDKKYSIGLDIGTNSVGWAVITDEYKVPSKKFKVLGNTDRHSIKKNLIGALLFDSGETAEATRLKRTARRRYTRRKNRICYLQEIFSNEMAKVDDSFFHRLEESFLVEEDKKHERHPIFGNIVDEVAYHEKYPTIYHLRKKLVDSTDKADLRLIYLALAHMIKFRGHFLIEGDLNPDNSDVDKLFIQLVQTYNQLFEENPINASGVDAKAILSARLSKSRRLENLIAQLPGEKKNGLFGNLIALSLGLTPNFKSNFDLAEDAKLQLSKDTYDDDLDNLLAQIGDQYADLFLAAKNLSDAILLSDILRVNTEITKAPLSASMIKRYDEHHQDLTLLKALVRQQLPEKYKEIFFDQSKNGYAGYIDGGASQEEFYKFIKPILEKMDGTEELLVKLNREDLLRKQRTFDNGSIPHQIHLGELHAILRRQEDFYPFLKDNREKIEKILTFRIPYYVGPLARGNSRFAWMTRKSEETITPWNFEEVVDKGASAQSFIERMTNFDKNLPNEKVLPKHSLLYEYFTVYNELTKVKYVTEGMRKPAFLSGEQKKAIVDLLFKTNRKVTVKQLKEDYFKKIECFDSVEISGVEDRFNASLGTYHDLLKIIKDKDFLDNEENEDILEDIVLTLTLFEDREMIEERLKTYAHLFDDKVMKQLKRRRYTGWGRLSRKLINGIRDKQSGKTILDFLKSDGFANRNFMQLIHDDSLTFKEDIQKAQVSGQGDSLHEHIANLAGSPAIKKGILQTVKVVDELVKVMGRHKPENIVIEMARENQTTQKGQKNSRERMKRIEEGIKELGSQILKEHPVENTQLQNEKLYLYYLQNGRDMYVDQELDINRLSDYDVDHIVPQSFLKDDSIDNKVLTRSDKARGKSDNVPSEEVVKKMKNYWRQLLNAKLITQRKFDNLTKAERGGLSELDKAGFIKRQLVETRQITKHVAQILDSRMNTKYDENDKLIREVKVITLKSKLVSDFRKDFQFYKVREINNYHHAHDAYLNAVVGTALIKKYPKLESEFVYGDYKVYDVRKMIAKSEQEIGKATAKYFFYSNIMNFFKTEITLANGEIRKRPLIETNGETGEIVWDKGRDFATVRKVLSMPQVNIVKKTEVQTGGFSKESILPKRNSDKLIARKKDWDPKKYGGFDSPTVAYSVLVVAKVEKGKSKKLKSVKELLGITIMERSSFEKNPIDFLEAKGYKEVKKDLIIKLPKYSLFELENGRKRMLASAGELQKGNELALPSKYVNFLYLASHYEKLKGSPEDNEQKQLFVEQHKHYLDEIIEQISEFSKRVILADANLDKVLSAYNKHRDKPIREQAENIIHLFTLTNLGAPAAFKYFDTTIDRKRYTSTKEVLDATLIHQSITGLYETRIDLSQLGGDGGGSSPAPGGTLNIEDEHRLHETSKEPDVSLGSTWLSDFPQAWAETGGMGLAVRQAPLIIPLKATSTPVSIKQYPMSQEARLGIKPHIQRLLDQGILVPCQSPWNTPLLPVKKPGTNDYRPVQDLREVNKRVEDIHPTVPNPYNLLSGLPPSHQWYTVLDLKDAFFCLRLHPTSQPLFAFEWRDPEMGISGQLTWTRLPQGFKNSPTLFNEALHRDLADFRIQHPDLILLQYVDDLLLAATSELDCQQGTRALLQTLGNLGYRASAKKAQICQKQVKYLGYLLKEGQRWLTEARKETVMGQPTPKTPRQLREFLGKAGFCRLFIPGFAEMAAPLYPLTKPGTLFNWGPDQQKAYQEIKQALLTAPALGLPDLTKPFELFVDEKQGYAKGVLTQKLGPWRRPVAYLSKKLDPVAAGWPPCLRMVAAIAVLTKDAGKLTMGQPLVILAPHAVEALVKQPPDRWLSNARMTHYQALLLDTDRVQFGPVVALNPATLLPLPEEGLQHNCLDILAEAHGTRPDLTDQPLPDADHTWYTDGSSLLQEGQRKAGAAVTTETEVIWAKALPAGTSAQRAELIALTQALKMAEGKKLNVYTDSRYAFATAHIHGEIYRRRGWLTSEGKEIKNKDEILALLKALFLPKRLSIIHCPGHQKGHSAEARGNRMADQAARKAAITETPDTSTLLAGKRTADGSEFEKRTADGSEFESPKKKAKVE

SEQ ID NO: 3056 - protein, 2094 aa, synthetic construct
  source 1..2094: note = Description of Artificial Sequence: Synthetic polypeptide
MPAAKRVKLDGGDKKYSIGLDIGTNSVGWAVITDEYKVPSKKFKVLGNTDRHSIKKNLIGALLFDSGETAEATRLKRTARRRYTRRKNRICYLQEIFSNEMAKVDDSFFHRLEESFLVEEDKKHERHPIFGNIVDEVAYHEKYPTIYHLRKKLVDSTDKADLRLIYLALAHMIKFRGHFLIEGDLNPDNSDVDKLFIQLVQTYNQLFEENPINASGVDAKAILSARLSKSRRLENLIAQLPGEKKNGLFGNLIALSLGLTPNFKSNFDLAEDAKLQLSKDTYDDDLDNLLAQIGDQYADLFLAAKNLSDAILLSDILRVNTEITKAPLSASMIKRYDEHHQDLTLLKALVRQQLPEKYKEIFFDQSKNGYAGYIDGGASQEEFYKFIKPILEKMDGTEELLVKLNREDLLRKQRTFDNGSIPHQIHLGELHAILRRQEDFYPFLKDNREKIEKILTFRIPYYVGPLARGNSRFAWMTRKSEETITPWNFEEVVDKGASAQSFIERMTNFDKNLPNEKVLPKHSLLYEYFTVYNELTKVKYVTEGMRKPAFLSGEQKKAIVDLLFKTNRKVTVKQLKEDYFKKIECFDSVEISGVEDRFNASLGTYHDLLKIIKDKDFLDNEENEDILEDIVLTLTLFEDREMIEERLKTYAHLFDDKVMKQLKRRRYTGWGRLSRKLINGIRDKQSGKTILDFLKSDGFANRNFMQLIHDDSLTFKEDIQKAQVSGQGDSLHEHIANLAGSPAIKKGILQTVKVVDELVKVMGRHKPENIVIEMARENQTTQKGQKNSRERMKRIEEGIKELGSQILKEHPVENTQLQNEKLYLYYLQNGRDMYVDQELDINRLSDYDVDHIVPQSFLKDDSIDNKVLTRSDKARGKSDNVPSEEVVKKMKNYWRQLLNAKLITQRKFDNLTKAERGGLSELDKAGFIKRQLVETRQITKHVAQILDSRMNTKYDENDKLIREVKVITLKSKLVSDFRKDFQFYKVREINNYHHAHDAYLNAVVGTALIKKYPKLESEFVYGDYKVYDVRKMIAKSEQEIGKATAKYFFYSNIMNFFKTEITLANGEIRKRPLIETNGETGEIVWDKGRDFATVRKVLSMPQVNIVKKTEVQTGGFSKESILPKRNSDKLIARKKDWDPKKYGGFDSPTVAYSVLVVAKVEKGKSKKLKSVKELLGITIMERSSFEKNPIDFLEAKGYKEVKKDLIIKLPKYSLFELENGRKRMLASAGELQKGNELALPSKYVNFLYLASHYEKLKGSPEDNEQKQLFVEQHKHYLDEIIEQISEFSKRVILADANLDKVLSAYNKHRDKPIREQAENIIHLFTLTNLGAPAAFKYFDTTIDRKRYTSTKEVLDATLIHQSITGLYETRIDLSQLGGDGGGSSGGGPAPGGTLNIEDEHRLHETSKEPDVSLGSTWLSDFPQAWAETGGMGLAVRQAPLIIPLKATSTPVSIKQYPMSQEARLGIKPHIQRLLDQGILVPCQSPWNTPLLPVKKPGTNDYRPVQDLREVNKRVEDIHPTVPNPYNLLSGLPPSHQWYTVLDLKDAFFCLRLHPTSQPLFAFEWRDPEMGISGQLTWTRLPQGFKNSPTLFNEALHRDLADFRIQHPDLILLQYVDDLLLAATSELDCQQGTRALLQTLGNLGYRASAKKAQICQKQVKYLGYLLKEGQRWLTEARKETVMGQPTPKTPRQLREFLGKAGFCRLFIPGFAEMAAPLYPLTKPGTLFNWGPDQQKAYQEIKQALLTAPALGLPDLTKPFELFVDEKQGYAKGVLTQKLGPWRRPVAYLSKKLDPVAAGWPPCLRMVAAIAVLTKDAGKLTMGQPLVILAPHAVEALVKQPPDRWLSNARMTHYQALLLDTDRVQFGPVVALNPATLLPLPEEGLQHNCLDILAEAHGTRPDLTDQPLPDADHTWYTDGSSLLQEGQRKAGAAVTTETEVIWAKALPAGTSAQRAELIALTQALKMAEGKKLNVYTDSRYAFATAHIHGEIYRRRGWLTSEGKEIKNKDEILALLKALFLPKRLSIIHCPGHQKGHSAEARGNRMADQAARKAAITETPDTSTLLAGKRTADGSEFEKRTADGSEFESPKKKAKVE

SEQ ID NO: 3057 - protein, 2096 aa, synthetic construct; identical to SEQ ID NO: 2810
  source 1..2096: note = Description of Artificial Sequence: Synthetic polypeptide

SEQ ID NO: 3058 - protein, 2091 aa, synthetic construct
  source 1..2091: note = Description of Artificial Sequence: Synthetic polypeptide
MPAAKRVKLDGGDKKYSIGLDIGTNSVGWAVITDEYKVPSKKFKVLGNTDRHSIKKNLIGALLFDSGETAEATRLKRTARRRYTRRKNRICYLQEIFSNEMAKVDDSFFHRLEESFLVEEDKKHERHPIFGNIVDEVAYHEKYPTIYHLRKKLVDSTDKADLRLIYLALAHMIKFRGHFLIEGDLNPDNSDVDKLFIQLVQTYNQLFEENPINASGVDAKAILSARLSKSRRLENLIAQLPGEKKNGLFGNLIALSLGLTPNFKSNFDLAEDAKLQLSKDTYDDDLDNLLAQIGDQYADLFLAAKNLSDAILLSDILRVNTEITKAPLSASMIKRYDEHHQDLTLLKALVRQQLPEKYKEIFFDQSKNGYAGYIDGGASQEEFYKFIKPILEKMDGTEELLVKLNREDLLRKQRTFDNGSIPHQIHLGELHAILRRQEDFYPFLKDNREKIEKILTFRIPYYVGPLARGNSRFAWMTRKSEETITPWNFEEVVDKGASAQSFIERMTNFDKNLPNEKVLPKHSLLYEYFTVYNELTKVKYVTEGMRKPAFLSGEQKKAIVDLLFKTNRKVTVKQLKEDYFKKIECFDSVEISGVEDRFNASLGTYHDLLKIIKDKDFLDNEENEDILEDIVLTLTLFEDREMIEERLKTYAHLFDDKVMKQLKRRRYTGWGRLSRKLINGIRDKQSGKTILDFLKSDGFANRNFMQLIHDDSLTFKEDIQKAQVSGQGDSLHEHIANLAGSPAIKKGILQTVKVVDELVKVMGRHKPENIVIEMARENQTTQKGQKNSRERMKRIEEGIKELGSQILKEHPVENTQLQNEKLYLYYLQNGRDMYVDQELDINRLSDYDVDHIVPQSFLKDDSIDNKVLTRSDKARGKSDNVPSEEVVKKMKNYWRQLLNAKLITQRKFDNLTKAERGGLSELDKAGFIKRQLVETRQITKHVAQILDSRMNTKYDENDKLIREVKVITLKSKLVSDFRKDFQFYKVREINNYHHAHDAYLNAVVGTALIKKYPKLESEFVYGDYKVYDVRKMIAKSEQEIGKATAKYFFYSNIMNFFKTEITLANGEIRKRPLIETNGETGEIVWDKGRDFATVRKVLSMPQVNIVKKTEVQTGGFSKESILPKRNSDKLIARKKDWDPKKYGGFDSPTVAYSVLVVAKVEKGKSKKLKSVKELLGITIMERSSFEKNPIDFLEAKGYKEVKKDLIIKLPKYSLFELENGRKRMLASAGELQKGNELALPSKYVNFLYLASHYEKLKGSPEDNEQKQLFVEQHKHYLDEIIEQISEFSKRVILADANLDKVLSAYNKHRDKPIREQAENIIHLFTLTNLGAPAAFKYFDTTIDRKRYTSTKEVLDATLIHQSITGLYETRIDLSQLGGDGGGSSGGGGGTLNIEDEHRLHETSKEPDVSLGSTWLSDFPQAWAETGGMGLAVRQAPLIIPLKATSTPVSIKQYPMSQEARLGIKPHIQRLLDQGILVPCQSPWNTPLLPVKKPGTNDYRPVQDLREVNKRVEDIHPTVPNPYNLLSGLPPSHQWYTVLDLKDAFFCLRLHPTSQPLFAFEWRDPEMGISGQLTWTRLPQGFKNSPTLFNEALHRDLADFRIQHPDLILLQYVDDLLLAATSELDCQQGTRALLQTLGNLGYRASAKKAQICQKQVKYLGYLLKEGQRWLTEARKETVMGQPTPKTPRQLREFLGKAGFCRLFIPGFAEMAAPLYPLTKPGTLFNWGPDQQKAYQEIKQALLTAPALGLPDLTKPFELFVDEKQGYAKGVLTQKLGPWRRPVAYLSKKLDPVAAGWPPCLRMVAAIAVLTKDAGKLTMGQPLVILAPHAVEALVKQPPDRWLSNARMTHYQALLLDTDRVQFGPVVALNPATLLPLPEEGLQHNCLDILAEAHGTRPDLTDQPLPDADHTWYTDGSSLLQEGQRKAGAAVTTETEVIWAKALPAGTSAQRAELIALTQALKMAEGKKLNVYTDSRYAFATAHIHGEIYRRRGWLTSEGKEIKNKDEILALLKALFLPKRLSIIHCPGHQKGHSAEARGNRMADQAARKAAITETPDTSTLLAGKRTADGSEFEKRTADGSEFESPKKKAKVE

SEQ ID NO: 3059 - protein, 2094 aa, synthetic construct; identical to SEQ ID NO: 2804
  source 1..2094: note = Description of Artificial Sequence: Synthetic polypeptide

SEQ ID NO: 3060 - protein, 2091 aa, synthetic construct
  source 1..2091: note = Description of Artificial Sequence: Synthetic polypeptide
MPAAKRVKLDGGDKKYSIGLDIGTNSVGWAVITDEYKVPSKKFKVLGNTDRHSIKKNLIGALLFDSGETAEATRLKRTARRRYTRRKNRICYLQEIFSNEMAKVDDSFFHRLEESFLVEEDKKHERHPIFGNIVDEVAYHEKYPTIYHLRKKLVDSTDKADLRLIYLALAHMIKFRGHFLIEGDLNPDNSDVDKLFIQLVQTYNQLFEENPINASGVDAKAILSARLSKSRRLENLIAQLPGEKKNGLFGNLIALSLGLTPNFKSNFDLAEDAKLQLSKDTYDDDLDNLLAQIGDQYADLFLAAKNLSDAILLSDILRVNTEITKAPLSASMIKRYDEHHQDLTLLKALVRQQLPEKYKEIFFDQSKNGYAGYIDGGASQEEFYKFIKPILEKMDGTEELLVKLNREDLLRKQRTFDNGSIPHQIHLGELHAILRRQEDFYPFLKDNREKIEKILTFRIPYYVGPLARGNSRFAWMTRKSEETITPWNFEEVVDKGASAQSFIERMTNFDKNLPNEKVLPKHSLLYEYFTVYNELTKVKYVTEGMRKPAFLSGEQKKAIVDLLFKTNRKVTVKQLKEDYFKKIECFDSVEISGVEDRFNASLGTYHDLLKIIKDKDFLDNEENEDILEDIVLTLTLFEDREMIEERLKTYAHLFDDKVMKQLKRRRYTGWGRLSRKLINGIRDKQSGKTILDFLKSDGFANRNFMQLIHDDSLTFKEDIQKAQVSGQGDSLHEHIANLAGSPAIKKGILQTVKVVDELVKVMGRHKPENIVIEMARENQTTQKGQKNSRERMKRIEEGIKELGSQILKEHPVENTQLQNEKLYLYYLQNGRDMYVDQELDINRLSDYDVDHIVPQSFLKDDSIDNKVLTRSDKARGKSDNVPSEEVVKKMKNYWRQLLNAKLITQRKFDNLTKAERGGLSELDKAGFIKRQLVETRQITKHVAQILDSRMNTKYDENDKLIREVKVITLKSKLVSDFRKDFQFYKVREINNYHHAHDAYLNAVVGTALIKKYPKLESEFVYGDYKVYDVRKMIAKSEQEIGKATAKYFFYSNIMNFFKTEITLANGEIRKRPLIETNGETGEIVWDKGRDFATVRKVLSMPQVNIVKKTEVQTGGFSKESILPKRNSDKLIARKKDWDPKKYGGFDSPTVAYSVLVVAKVEKGKSKKLKSVKELLGITIMERSSFEKNPIDFLEAKGYKEVKKDLIIKLPKYSLFELENGRKRMLASAGELQKGNELALPSKYVNFLYLASHYEKLKGSPEDNEQKQLFVEQHKHYLDEIIEQISEFSKRVILADANLDKVLSAYNKHRDKPIREQAENIIHLFTLTNLGAPAAFKYFDTTIDRKRYTSTKEVLDATLIHQSITGLYETRIDLSQLGGDGGPAPGGSGGTLNIEDEHRLHETSKEPDVSLGSTWLSDFPQAWAETGGMGLAVRQAPLIIPLKATSTPVSIKQYPMSQEARLGIKPHIQRLLDQGILVPCQSPWNTPLLPVKKPGTNDYRPVQDLREVNKRVEDIHPTVPNPYNLLSGLPPSHQWYTVLDLKDAFFCLRLHPTSQPLFAFEWRDPEMGISGQLTWTRLPQGFKNSPTLFNEALHRDLADFRIQHPDLILLQYVDDLLLAATSELDCQQGTRALLQTLGNLGYRASAKKAQICQKQVKYLGYLLKEGQRWLTEARKETVMGQPTPKTPRQLREFLGKAGFCRLFIPGFAEMAAPLYPLTKPGTLFNWGPDQQKAYQEIKQALLTAPALGLPDLTKPFELFVDEKQGYAKGVLTQKLGPWRRPVAYLSKKLDPVAAGWPPCLRMVAAIAVLTKDAGKLTMGQPLVILAPHAVEALVKQPPDRWLSNARMTHYQALLLDTDRVQFGPVVALNPATLLPLPEEGLQHNCLDILAEAHGTRPDLTDQPLPDADHTWYTDGSSLLQEGQRKAGAAVTTETEVIWAKALPAGTSAQRAELIALTQALKMAEGKKLNVYTDSRYAFATAHIHGEIYRRRGWLTSEGKEIKNKDEILALLKALFLPKRLSIIHCPGHQKGHSAEARGNRMADQAARKAAITETPDTSTLLAGKRTADGSEFEKRTADGSEFESPKKKAKVE

SEQ ID NO: 3061 - protein, 2093 aa, synthetic construct
  source 1..2093: note = Description of Artificial Sequence: Synthetic polypeptide
MPAAKRVKLDGGDKKYSIGLDIGTNSVGWAVITDEYKVPSKKFKVLGNTDRHSIKKNLIGALLFDSGETAEATRLKRTARRRYTRRKNRICYLQEIFSNEMAKVDDSFFHRLEESFLVEEDKKHERHPIFGNIVDEVAYHEKYPTIYHLRKKLVDSTDKADLRLIYLALAHMIKFRGHFLIEGDLNPDNSDVDKLFIQLVQTYNQLFEENPINASGVDAKAILSARLSKSRRLENLIAQLPGEKKNGLFGNLIALSLGLTPNFKSNFDLAEDAKLQLSKDTYDDDLDNLLAQIGDQYADLFLAAKNLSDAILLSDILRVNTEITKAPLSASMIKRYDEHHQDLTLLKALVRQQLPEKYKEIFFDQSKNGYAGYIDGGASQEEFYKFIKPILEKMDGTEELLVKLNREDLLRKQRTFDNGSIPHQIHLGELHAILRRQEDFYPFLKDNREKIEKILTFRIPYYVGPLARGNSRFAWMTRKSEETITPWNFEEVVDKGASAQSFIERMTNFDKNLPNEKVLPKHSLLYEYFTVYNELTKVKYVTEGMRKPAFLSGEQKKAIVDLLFKTNRKVTVKQLKEDYFKKIECFDSVEISGVEDRFNASLGTYHDLLKIIKDKDFLDNEENEDILEDIVLTLTLFEDREMIEERLKTYAHLFDDKVMKQLKRRRYTGWGRLSRKLINGIRDKQSGKTILDFLKSDGFANRNFMQLIHDDSLTFKEDIQKAQVSGQGDSLHEHIANLAGSPAIKKGILQTVKVVDELVKVMGRHKPENIVIEMARENQTTQKGQKNSRERMKRIEEGIKELGSQILKEHPVENTQLQNEKLYLYYLQNGRDMYVDQELDINRLSDYDVDHIVPQSFLKDDSIDNKVLTRSDKARGKSDNVPSEEVVKKMKNYWRQLLNAKLITQRKFDNLTKAERGGLSELDKAGFIKRQLVETRQITKHVAQILDSRMNTKYDENDKLIREVKVITLKSKLVSDFRKDFQFYKVREINNYHHAHDAYLNAVVGTALIKKYPKLESEFVYGDYKVYDVRKMIAKSEQEIGKATAKYFFYSNIMNFFKTEITLANGEIRKRPLIETNGETGEIVWDKGRDFATVRKVLSMPQVNIVKKTEVQTGGFSKESILPKRNSDKLIARKKDWDPKKYGGFDSPTVAYSVLVVAKVEKGKSKKLKSVKELLGITIMERSSFEKNPIDFLEAKGYKEVKKDLIIKLPKYSLFELENGRKRMLASAGELQKGNELALPSKYVNFLYLASHYEKLKGSPEDNEQKQLFVEQHKHYLDEIIEQISEFSKRVILADANLDKVLSAYNKHRDKPIREQAENIIHLFTLTNLGAPAAFKYFDTTIDRKRYTSTKEVLDATLIHQSITGLYETRIDLSQLGGDGGPAPEAAAKGGTLNIEDEHRLHETSKEPDVSLGSTWLSDFPQAWAETGGMGLAVRQAPLIIPLKATSTPVSIKQYPMSQEARLGIKPHIQRLLDQGILVPCQSPWNTPLLPVKKPGTNDYRPVQDLREVNKRVEDIHPTVPNPYNLLSGLPPSHQWYTVLDLKDAFFCLRLHPTSQPLFAFEWRDPEMGISGQLTWTRLPQGFKNSPTLFNEALHRDLADFRIQHPDLILLQYVDDLLLAATSELDCQQGTRALLQTLGNLGYRASAKKAQICQKQVKYLGYLLKEGQRWLTEARKETVMGQPTPKTPRQLREFLGKAGFCRLFIPGFAEMAAPLYPLTKPGTLFNWGPDQQKAYQEIKQALLTAPALGLPDLTKPFELFVDEKQGYAKGVLTQKLGPWRRPVAYLSKKLDPVAAGWPPCLRMVAAIAVLTKDAGKLTMGQPLVILAPHAVEALVKQPPDRWLSNARMTHYQALLLDTDRVQFGPVVALNPATLLPLPEEGLQHNCLDILAEAHGTRPDLTDQPLPDADHTWYTDGSSLLQEGQRKAGAAVTTETEVIWAKALPAGTSAQRAELIALTQALKMAEGKKLNVYTDSRYAFATAHIHGEIYRRRGWLTSEGKEIKNKDEILALLKALFLPKRLSIIHCPGHQKGHSAEARGNRMADQAARKAAITETPDTSTLLAGKRTADGSEFEKRTADGSEFESPKKKAKVE

SEQ ID NO: 3062 - protein, 2093 aa, synthetic construct; identical to SEQ ID NO: 2828
  source 1..2093: note = Description of Artificial Sequence: Synthetic polypeptide

SEQ ID NO: 3063 - protein, 2105 aa, synthetic construct
  source 1..2105: note = Description of Artificial Sequence: Synthetic polypeptide
MPAAKRVKLDGGDKKYSIGLDIGTNSVGWAVITDEYKVPSKKFKVLGNTDRHSIKKNLIGALLFDSGETAEATRLKRTARRRYTRRKNRICYLQEIFSNEMAKVDDSFFHRLEESFLVEEDKKHERHPIFGNIVDEVAYHEKYPTIYHLRKKLVDSTDKADLRLIYLALAHMIKFRGHFLIEGDLNPDNSDVDKLFIQLVQTYNQLFEENPINASGVDAKAILSARLSKSRRLENLIAQLPGEKKNGLFGNLIALSLGLTPNFKSNFDLAEDAKLQLSKDTYDDDLDNLLAQIGDQYADLFLAAKNLSDAILLSDILRVNTEITKAPLSASMIKRYDEHHQDLTLLKALVRQQLPEKYKEIFFDQSKNGYAGYIDGGASQEEFYKFIKPILEKMDGTEELLVKLNREDLLRKQRTFDNGSIPHQIHLGELHAILRRQEDFYPFLKDNREKIEKILTFRIPYYVGPLARGNSRFAWMTRKSEETITPWNFEEVVDKGASAQSFIERMTNFDKNLPNEKVLPKHSLLYEYFTVYNELTKVKYVTEGMRKPAFLSGEQKKAIVDLLFKTNRKVTVKQLKEDYFKKIECFDSVEISGVEDRFNASLGTYHDLLKIIKDKDFLDNEENEDILEDIVLTLTLFEDREMIEERLKTYAHLFDDKVMKQLKRRRYTGWGRLSRKLINGIRDKQSGKTILDFLKSDGFANRNFMQLIHDDSLTFKEDIQKAQVSGQGDSLHEHIANLAGSPAIKKGILQTVKVVDELVKVMGRHKPENIVIEMARENQTTQKGQKNSRERMKRIEEGIKELGSQILKEHPVENTQLQNEKLYLYYLQNGRDMYVDQELDINRLSDYDVDHIVPQSFLKDDSIDNKVLTRSDKARGKSDNVPSEEVVKKMKNYWRQLLNAKLITQRKFDNLTKAERGGLSELDKAGFIKRQLVETRQITKHVAQILDSRMNTKYDENDKLIREVKVITLKSKLVSDFRKDFQFYKVREINNYHHAHDAYLNAVVGTALIKKYPKLESEFVYGDYKVYDVRKMIAKSEQEIGKATAKYFFYSNIMNFFKTEITLANGEIRKRPLIETNGETGEIVWDKGRDFATVRKVLSMPQVNIVKKTEVQTGGFSKESILPKRNSDKLIARKKDWDPKKYGGFDSPTVAYSVLVVAKVEKGKSKKLKSVKELLGITIMERSSFEKNPIDFLEAKGYKEVKKDLIIKLPKYSLFELENGRKRMLASAGELQKGNELALPSKYVNFLYLASHYEKLKGSPEDNEQKQLFVEQHKHYLDEIIEQISEFSKRVILADANLDKVLSAYNKHRDKPIREQAENIIHLFTLTNLGAPAAFKYFDTTIDRKRYTSTKEVLDATLIHQSITGLYETRIDLSQLGGDGGGGGGSGGGGSGGGGSGGGGSGGTLNIEDEHRLHETSKEPDVSLGSTWLSDFPQAWAETGGMGLAVRQAPLIIPLKATSTPVSIKQYPMSQEARLGIKPHIQRLLDQGILVPCQSPWNTPLLPVKKPGTNDYRPVQDLREVNKRVEDIHPTVPNPYNLLSGLPPSHQWYTVLDLKDAFFCLRLHPTSQPLFAFEWRDPEMGISGQLTWTRLPQGFKNSPTLFNEALHRDLADFRIQHPDLILLQYVDDLLLAATSELDCQQGTRALLQTLGNLGYRASAKKAQICQKQVKYLGYLLKEGQRWLTEARKETVMGQPTPKTPRQLREFLGKAGFCRLFIPGFAEMAAPLYPLTKPGTLFNWGPDQQKAYQEIKQALLTAPALGLPDLTKPFELFVDEKQGYAKGVLTQKLGPWRRPVAYLSKKLDPVAAGWPPCLRMVAAIAVLTKDAGKLTMGQPLVILAPHAVEALVKQPPDRWLSNARMTHYQALLLDTDRVQFGPVVALNPATLLPLPEEGLQHNCLDILAEAHGTRPDLTDQPLPDADHTWYTDGSSLLQEGQRKAGAAVTTETEVIWAKALPAGTSAQRAELIALTQALKMAEGKKLNVYTDSRYAFATAHIHGEIYRRRGWLTSEGKEIKNKDEILALLKALFLPKRLSIIHCPGHQKGHSAEARGNRMADQAARKAAITETPDTSTLLAGKRTADGSEFEKRTADGSEFESPKKKAKVE

SEQ ID NO: 3064 - protein, 2094 aa, synthetic construct
  source 1..2094: note = Description of Artificial Sequence: Synthetic polypeptide
MPAAKRVKLDGGDKKYSIGLDIGTNSVGWAVITDEYKVPSKKFKVLGNTDRHSIKKNLIGALLFDSGETAEATRLKRTARRRYTRRKNRICYLQEIFSNEMAKVDDSFFHRLEESFLVEEDKKHERHPIFGNIVDEVAYHEKYPTIYHLRKKLVDSTDKADLRLIYLALAHMIKFRGHFLIEGDLNPDNSDVDKLFIQLVQTYNQLFEENPINASGVDAKAILSARLSKSRRLENLIAQLPGEKKNGLFGNLIALSLGLTPNFKSNFDLAEDAKLQLSKDTYDDDLDNLLAQIGDQYADLFLAAKNLSDAILLSDILRVNTEITKAPLSASMIKRYDEHHQDLTLLKALVRQQLPEKYKEIFFDQSKNGYAGYIDGGASQEEFYKFIKPILEKMDGTEELLVKLNREDLLRKQRTFDNGSIPHQIHLGELHAILRRQEDFYPFLKDNREKIEKILTFRIPYYVGPLARGNSRFAWMTRKSEETITPWNFEEVVDKGASAQSFIERMTNFDKNLPNEKVLPKHSLLYEYFTVYNELTKVKYVTEGMRKPAFLSGEQKKAIVDLLFKTNRKVTVKQLKEDYFKKIECFDSVEISGVEDRFNASLGTYHDLLKIIKDKDFLDNEENEDILEDIVLTLTLFEDREMIEERLKTYAHLFDDKVMKQLKRRRYTGWGRLSRKLINGIRDKQSGKTILDFLKSDGFANRNFMQLIHDDSLTFKEDIQKAQVSGQGDSLHEHIANLAGSPAIKKGILQTVKVVDELVKVMGRHKPENIVIEMARENQTTQKGQKNSRERMKRIEEGIKELGSQILKEHPVENTQLQNEKLYLYYLQNGRDMYVDQELDINRLSDYDVDHIVPQSFLKDDSIDNKVLTRSDKARGKSDNVPSEEVVKKMKNYWRQLLNAKLITQRKFDNLTKAERGGLSELDKAGFIKRQLVETRQITKHVAQILDSRMNTKYDENDKLIREVKVITLKSKLVSDFRKDFQFYKVREINNYHHAHDAYLNAVVGTALIKKYPKLESEFVYGDYKVYDVRKMIAKSEQEIGKATAKYFFYSNIMNFFKTEITLANGEIRKRPLIETNGETGEIVWDKGRDFATVRKVLSMPQVNIVKKTEVQTGGFSKESILPKRNSDKLIARKKDWDPKKYGGFDSPTVAYSVLVVAKVEKGKSKKLKSVKELLGITIMERSSFEKNPIDFLEAKGYKEVKKDLIIKLPKYSLFELENGRKRMLASAGELQKGNELALPSKYVNFLYLASHYEKLKGSPEDNEQKQLFVEQHKHYLDEIIEQISEFSKRVILADANLDKVLSAYNKHRDKPIREQAENIIHLFTLTNLGAPAAFKYFDTTIDRKRYTSTKEVLDATLIHQSITGLYETRIDLSQLGGDGGPAPGGSGSSGGTLNIEDEHRLHETSKEPDVSLGSTWLSDFPQAWAETGGMGLAVRQAPLIIPLKATSTPVSIKQYPMSQEARLGIKPHIQRLLDQGILVPCQSPWNTPLLPVKKPGTNDYRPVQDLREVNKRVEDIHPTVPNPYNLLSGLPPSHQWYTVLDLKDAFFCLRLHPTSQPLFAFEWRDPEMGISGQLTWTRLPQGFKNSPTLFNEALHRDLADFRIQHPDLILLQYVDDLLLAATSELDCQQGTRALLQTLGNLGYRASAKKAQICQKQVKYLGYLLKEGQRWLTEARKETVMGQPTPKTPRQLREFLGKAGFCRLFIPGFAEMAAPLYPLTKPGTLFNWGPDQQKAYQEIKQALLTAPALGLPDLTKPFELFVDEKQGYAKGVLTQKLGPWRRPVAYLSKKLDPVAAGWPPCLRMVAAIAVLTKDAGKLTMGQPLVILAPHAVEALVKQPPDRWLSNARMTHYQALLLDTDRVQFGPVVALNPATLLPLPEEGLQHNCLDILAEAHGTRPDLTDQPLPDADHTWYTDGSSLLQEGQRKAGAAVTTETEVIWAKALPAGTSAQRAELIALTQALKMAEGKKLNVYTDSRYAFATAHIHGEIYRRRGWLTSEGKEIKNKDEILALLKALFLPKRLSIIHCPGHQKGHSAEARGNRMADQAARKAAITETPDTSTLLAGKRTADGSEFEKRTADGSEFESPKKKAKVE

SEQ ID NO: 3065 - protein, 2090 aa, synthetic construct; identical to SEQ ID NO: 2825
  source 1..2090: note = Description of Artificial Sequence: Synthetic polypeptide

SEQ ID NO: 3066 - protein, 2090 aa, synthetic construct
  source 1..2090: note = Description of Artificial Sequence: Synthetic polypeptide
MPAAKRVKLDGGDKKYSIGLDIGTNSVGWAVITDEYKVPSKKFKVLGNTDRHSIKKNLIGALLFDSGETAEATRLKRTARRRYTRRKNRICYLQEIFSNEMAKVDDSFFHRLEESFLVEEDKKHERHPIFGNIVDEVAYHEKYPTIYHLRKKLVDSTDKADLRLIYLALAHMIKFRGHFLIEGDLNPDNSDVDKLFIQLVQTYNQLFEENPINASGVDAKAILSARLSKSRRLENLIAQLPGEKKNGLFGNLIALSLGLTPNFKSNFDLAEDAKLQLSKDTYDDDLDNLLAQIGDQYADLFLAAKNLSDAILLSDILRVNTEITKAPLSASMIKRYDEHHQDLTLLKALVRQQLPEKYKEIFFDQSKNGYAGYIDGGASQEEFYKFIKPILEKMDGTEELLVKLNREDLLRKQRTFDNGSIPHQIHLGELHAILRRQEDFYPFLKDNREKIEKILTFRIPYYVGPLARGNSRFAWMTRKSEETITPWNFEEVVDKGASAQSFIERMTNFDKNLPNEKVLPKHSLLYEYFTVYNELTKVKYVTEGMRKPAFLSGEQKKAIVDLLFKTNRKVTVKQLKEDYFKKIECFDSVEISGVEDRFNASLGTYHDLLKIIKDKDFLDNEENEDILEDIVLTLTLFEDREMIEERLKTYAHLFDDKVMKQLKRRRYTGWGRLSRKLINGIRDKQSGKTILDFLKSDGFANRNFMQLIHDDSLTFKEDIQKAQVSGQGDSLHEHIANLAGSPAIKKGILQTVKVVDELVKVMGRHKPENIVIEMARENQTTQKGQKNSRERMKRIEEGIKELGSQILKEHPVENTQLQNEKLYLYYLQNGRDMYVDQELDINRLSDYDVDHIVPQSFLKDDSIDNKVLTRSDKARGKSDNVPSEEVVKKMKNYWRQLLNAKLITQRKFDNLTKAERGGLSELDKAGFIKRQLVETRQITKHVAQILDSRMNTKYDENDKLIREVKVITLKSKLVSDFRKDFQFYKVREINNYHHAHDAYLNAVVGTALIKKYPKLESEFVYGDYKVYDVRKMIAKSEQEIGKATAKYFFYSNIMNFFKTEITLANGEIRKRPLIETNGETGEIVWDKGRDFATVRKVLSMPQVNIVKKTEVQTGGFSKESILPKRNSDKLIARKKDWDPKKYGGFDSPTVAYSVLVVAKVEKGKSKKLKSVKELLGITIMERSSFEKNPIDFLEAKGYKEVKKDLIIKLPKYSLFELENGRKRMLASAGELQKGNELALPSKYVNFLYLASHYEKLKGSPEDNEQKQLFVEQHKHYLDEIIEQISEFSKRVILADANLDKVLSAYNKHRDKPIREQAENIIHLFTLTNLGAPAAFKYFDTTIDRKRYTSTKEVLDATLIHQSITGLYETRIDLSQLGGDGGPAPAPGGTLNIEDEHRLHETSKEPDVSLGSTWLSDFPQAWAETGGMGLAVRQAPLIIPLKATSTPVSIKQYPMSQEARLGIKPHIQRLLDQGILVPCQSPWNTPLLPVKKPGTNDYRPVQDLREVNKRVEDIHPTVPNPYNLLSGLPPSHQWYTVLDLKDAFFCLRLHPTSQPLFAFEWRDPEMGISGQLTWTRLPQGFKNSPTLFNEALHRDLADFRIQHPDLILLQYVDDLLLAATSELDCQQGTRALLQTLGNLGYRASAKKAQICQKQVKYLGYLLKEGQRWLTEARKETVMGQPTPKTPRQLREFLGKAGFCRLFIPGFAEMAAPLYPLTKPGTLFNWGPDQQKAYQEIKQALLTAPALGLPDLTKPFELFVDEKQGYAKGVLTQKLGPWRRPVAYLSKKLDPVAAGWPPCLRMVAAIAVLTKDAGKLTMGQPLVILAPHAVEALVKQPPDRWLSNARMTHYQALLLDTDRVQFGPVVALNPATLLPLPEEGLQHNCLDILAEAHGTRPDLTDQPLPDADHTWYTDGSSLLQEGQRKAGAAVTTETEVIWAKALPAGTSAQRAELIALTQALKMAEGKKLNVYTDSRYAFATAHIHGEIYRRRGWLTSEGKEIKNKDEILALLKALFLPKRLSIIHCPGHQKGHSAEARGNRMADQAARKAAITETPDTSTLLAGKRTADGSEFEKRTADGSEFESPKKKAKVE

SEQ ID NO: 3067 - protein, 2096 aa, synthetic construct; identical to SEQ ID NO: 2787
  source 1..2096: note = Description of Artificial Sequence: Synthetic polypeptide

SEQ ID NO: 3068 - protein, 2096 aa, synthetic construct
  source 1..2096: note = Description of Artificial Sequence: Synthetic polypeptide
MPAAKRVKLDGGDKKYSIGLDIGTNSVGWAVITDEYKVPSKKFKVLGNTDRHSIKKNLIGALLFDSGETAEATRLKRTARRRYTRRKNRICYLQEIFSNEMAKVDDSFFHRLEESFLVEEDKKHERHPIFGNIVDEVAYHEKYPTIYHLRKKLVDSTDKADLRLIYLALAHMIKFRGHFLIEGDLNPDNSDVDKLFIQLVQTYNQLFEENPINASGVDAKAILSARLSKSRRLENLIAQLPGEKKNGLFGNLIALSLGLTPNFKSNFDLAEDAKLQLSKDTYDDDLDNLLAQIGDQYADLFLAAKNLSDAILLSDILRVNTEITKAPLSASMIKRYDEHHQDLTLLKALVRQQLPEKYKEIFFDQSKNGYAGYIDGGASQEEFYKFIKPILEKMDGTEELLVKLNREDLLRKQRTFDNGSIPHQIHLGELHAILRRQEDFYPFLKDNREKIEKILTFRIPYYVGPLARGNSRFAWMTRKSEETITPWNFEEVVDKGASAQSFIERMTNFDKNLPNEKVLPKHSLLYEYFTVYNELTKVKYVTEGMRKPAFLSGEQKKAIVDLLFKTNRKVTVKQLKEDYFKKIECFDSVEISGVEDRFNASLGTYHDLLKIIKDKDFLDNEENEDILEDIVLTLTLFEDREMIEERLKTYAHLFDDKVMKQLKRRRYTGWGRLSRKLINGIRDKQSGKTILDFLKSDGFANRNFMQLIHDDSLTFKEDIQKAQVSGQGDSLHEHIANLAGSPAIKKGILQTVKVVDELVKVMGRHKPENIVIEMARENQTTQKGQKNSRERMKRIEEGIKELGSQILKEHPVENTQLQNEKLYLYYLQNGRDMYVDQELDINRLSDYDVDHIVPQSFLKDDSIDNKVLTRSDKARGKSDNVPSEEVVKKMKNYWRQLLNAKLITQRKFDNLTKAERGGLSELDKAGFIKRQLVETRQITKHVAQILDSRMNTKYDENDKLIREVKVITLKSKLVSDFRKDFQFYKVREINNYHHAHDAYLNAVVGTALIKKYPKLESEFVYGDYKVYDVRKMIAKSEQEIGKATAKYFFYSNIMNFFKTEITLANGEIRKRPLIETNGETGEIVWDKGRDFATVRKVLSMPQVNIVKKTEVQTGGFSKESILPKRNSDKLIARKKDWDPKKYGGFDSPTVAYSVLVVAKVEKGKSKKLKSVKELLGITIMERSSFEKNPIDFLEAKGYKEVKKDLIIKLPKYSLFELENGRKRMLASAGELQKGNELALPSKYVNFLYLASHYEKLKGSPEDNEQKQLFVEQHKHYLDEIIEQISEFSKRVILADANLDKVLSAYNKHRDKPIREQAENIIHLFTLTNLGAPAAFKYFDTTIDRKRYTSTKEVLDATLIHQSITGLYETRIDLSQLGGDGGPAPEAAAKGGGGGTLNIEDEHRLHETSKEPDVSLGSTWLSDFPQAWAETGGMGLAVRQAPLIIPLKATSTPVSIKQYPMSQEARLGIKPHIQRLLDQGILVPCQSPWNTPLLPVKKPGTNDYRPVQDLREVNKRVEDIHPTVPNPYNLLSGLPPSHQWYTVLDLKDAFFCLRLHPTSQPLFAFEWRDPEMGISGQLTWTRLPQGFKNSPTLFNEALHRDLADFRIQHPDLILLQYVDDLLLAATSELDCQQGTRALLQTLGNLGYRASAKKAQICQKQVKYLGYLLKEGQRWLTEARKETVMGQPTPKTPRQLREFLGKAGFCRLFIPGFAEMAAPLYPLTKPGTLFNWGPDQQKAYQEIKQALLTAPALGLPDLTKPFELFVDEKQGYAKGVLTQKLGPWRRPVAYLSKKLDPVAAGWPPCLRMVAAIAVLTKDAGKLTMGQPLVILAPHAVEALVKQPPDRWLSNARMTHYQALLLDTDRVQFGPVVALNPATLLPLPEEGLQHNCLDILAEAHGTRPDLTDQPLPDADHTWYTDGSSLLQEGQRKAGAAVTTETEVIWAKALPAGTSAQRAELIALTQALKMAEGKKLNVYTDSRYAFATAHIHGEIYRRRGWLTSEGKEIKNKDEILALLKALFLPKRLSIIHCPGHQKGHSAEARGNRMADQAARKAAITETPDTSTLLAGKRTADGSEFEKRTADGSEFESPKKKAKVE

SEQ ID NO: 3069 - protein, 2088 aa, synthetic construct
  source 1..2088: note = Description of Artificial Sequence: Synthetic polypeptide
MPAAKRVKLDGGDKKYSIGLDIGTNSVGWAVITDEYKVPSKKFKVLGNTDRHSIKKNLIGALLFDSGETAEATRLKRTARRRYTRRKNRICYLQEIFSNEMAKVDDSFFHRLEESFLVEEDKKHERHPIFGNIVDEVAYHEKYPTIYHLRKKLVDSTDKADLRLIYLALAHMIKFRGHFLIEGDLNPDNSDVDKLFIQLVQTYNQLFEENPINASGVDAKAILSARLSKSRRLENLIAQLPGEKKNGLFGNLIALSLGLTPNFKSNFDLAEDAKLQLSKDTYDDDLDNLLAQIGDQYADLFLAAKNLSDAILLSDILRVNTEITKAPLSASMIKRYDEHHQDLTLLKALVRQQLPEKYKEIFFDQSKNGYAGYIDGGASQEEFYKFIKPILEKMDGTEELLVKLNREDLLRKQRTFDNGSIPHQIHLGELHAILRRQEDFYPFLKDNREKIEKILTFRIPYYVGPLARGNSRFAWMTRKSEETITPWNFEEVVDKGASAQSFIERMTNFDKNLPNEKVLPKHSLLYEYFTVYNELTKVKYVTEGMRKPAFLSGEQKKAIVDLLFKTNRKVTVKQLKEDYFKKIECFDSVEISGVEDRFNASLGTYHDLLKIIKDKDFLDNEENEDILEDIVLTLTLFEDREMIEERLKTYAHLFDDKVMKQLKRRRYTGWGRLSRKLINGIRDKQSGKTILDFLKSDGFANRNFMQLIHDDSLTFKEDIQKAQVSGQGDSLHEHIANLAGSPAIKKGILQTVKVVDELVKVMGRHKPENIVIEMARENQTTQKGQKNSRERMKRIEEGIKELGSQILKEHPVENTQLQNEKLYLYYLQNGRDMYVDQELDINRLSDYDVDHIVPQSFLKDDSIDNKVLTRSDKARGKSDNVPSEEVVKKMKNYWRQLLNAKLITQRKFDNLTKAERGGLSELDKAGFIKRQLVETRQITKHVAQILDSRMNTKYDENDKLIREVKVITLKSKLVSDFRKDFQFYKVREINNYHHAHDAYLNAVVGTALIKKYPKLESEFVYGDYKVYDVRKMIAKSEQEIGKATAKYFFYSNIMNFFKTEITLANGEIRKRPLIETNGETGEIVWDKGRDFATVRKVLSMPQVNIVKKTEVQTGGFSKESILPKRNSDKLIARKKDWDPKKYGGFDSPTVAYSVLVVAKVEKGKSKKLKSVKELLGITIMERSSFEKNPIDFLEAKGYKEVKKDLIIKLPKYSLFELENGRKRMLASAGELQKGNELALPSKYVNFLYLASHYEKLKGSPEDNEQKQLFVEQHKHYLDEIIEQISEFSKRVILADANLDKVLSAYNKHRDKPIREQAENIIHLFTLTNLGAPAAFKYFDTTIDRKRYTSTKEVLDATLIHQSITGLYETRIDLSQLGGDGGGSSGGTLNIEDEHRLHETSKEPDVSLGSTWLSDFPQAWAETGGMGLAVRQAPLIIPLKATSTPVSIKQYPMSQEARLGIKPHIQRLLDQGILVPCQSPWNTPLLPVKKPGTNDYRPVQDLREVNKRVEDIHPTVPNPYNLLSGLPPSHQWYTVLDLKDAFFCLRLHPTSQPLFAFEWRDPEMGISGQLTWTRLPQGFKNSPTLFNEALHRDLADFRIQHPDLILLQYVDDLLLAATSELDCQQGTRALLQTLGNLGYRASAKKAQICQKQVKYLGYLLKEGQRWLTEARKETVMGQPTPKTPRQLREFLGKAGFCRLFIPGFAEMAAPLYPLTKPGTLFNWGPDQQKAYQEIKQALLTAPALGLPDLTKPFELFVDEKQGYAKGVLTQKLGPWRRPVAYLSKKLDPVAAGWPPCLRMVAAIAVLTKDAGKLTMGQPLVILAPHAVEALVKQPPDRWLSNARMTHYQALLLDTDRVQFGPVVALNPATLLPLPEEGLQHNCLDILAEAHGTRPDLTDQPLPDADHTWYTDGSSLLQEGQRKAGAAVTTETEVIWAKALPAGTSAQRAELIALTQALKMAEGKKLNVYTDSRYAFATAHIHGEIYRRRGWLTSEGKEIKNKDEILALLKALFLPKRLSIIHCPGHQKGHSAEARGNRMADQAARKAAITETPDTSTLLAGKRTADGSEFEKRTADGSEFESPKKKAKVE

SEQ ID NO: 3070 - protein, 2094 aa, synthetic construct; identical to SEQ ID NO: 2809
  source 1..2094: note = Description of Artificial Sequence: Synthetic polypeptide

SEQ ID NO: 3071 - protein, 2097 aa, synthetic construct; identical to SEQ ID NO: 2806
  source 1..2097: note = Description of Artificial Sequence: Synthetic polypeptide

SEQ ID NO: 3072 - protein, 2096 aa, synthetic construct
  source 1..2096: note = Description of Artificial Sequence: Synthetic polypeptide
MPAAKRVKLDGGDKKYSIGLDIGTNSVGWAVITDEYKVPSKKFKVLGNTDRHSIKKNLIGALLFDSGETAEATRLKRTARRRYTRRKNRICYLQEIFSNEMAKVDDSFFHRLEESFLVEEDKKHERHPIFGNIVDEVAYHEKYPTIYHLRKKLVDSTDKADLRLIYLALAHMIKFRGHFLIEGDLNPDNSDVDKLFIQLVQTYNQLFEENPINASGVDAKAILSARLSKSRRLENLIAQLPGEKKNGLFGNLIALSLGLTPNFKSNFDLAEDAKLQLSKDTYDDDLDNLLAQIGDQYADLFLAAKNLSDAILLSDILRVNTEITKAPLSASMIKRYDEHHQDLTLLKALVRQQLPEKYKEIFFDQSKNGYAGYIDGGASQEEFYKFIKPILEKMDGTEELLVKLNREDLLRKQRTFDNGSIPHQIHLGELHAILRRQEDFYPFLKDNREKIEKILTFRIPYYVGPLARGNSRFAWMTRKSEETITPWNFEEVVDKGASAQSFIERMTNFDKNLPNEKVLPKHSLLYEYFTVYNELTKVKYVTEGMRKPAFLSGEQKKAIVDLLFKTNRKVTVKQLKEDYFKKIECFDSVEISGVEDRFNASLGTYHDLLKIIKDKDFLDNEENEDILEDIVLTLTLFEDREMIEERLKTYAHLFDDKVMKQLKRRRYTGWGRLSRKLINGIRDKQSGKTILDFLKSDGFANRNFMQLIHDDSLTFKEDIQKAQVSGQGDSLHEHIANLAGSPAIKKGILQTVKVVDELVKVMGRHKPENIVIEMARENQTTQKGQKNSRERMKRIEEGIKELGSQILKEHPVENTQLQNEKLYLYYLQNGRDMYVDQELDINRLSDYDVDHIVPQSFLKDDSIDNKVLTRSDKARGKSDNVPSEEVVKKMKNYWRQLLNAKLITQRKFDNLTKAERGGLSELDKAGFIKRQLVETRQITKHVAQILDSRMNTKYDENDKLIREVKVITLKSKLVSDFRKDFQFYKVREINNYHHAHDAYLNAVVGTALIKKYPKLESEFVYGDYKVYDVRKMIAKSEQEIGKATAKYFFYSNIMNFFKTEITLANGEIRKRPLIETNGETGEIVWDKGRDFATVRKVLSMPQVNIVKKTEVQTGGFSKESILPKRNSDKLIARKKDWDPKKYGGFDSPTVAYSVLVVAKVEKGKSKKLKSVKELLGITIMERSSFEKNPIDFLEAKGYKEVKKDLIIKLPKYSLFELENGRKRMLASAGELQKGNELALPSKYVNFLYLASHYEKLKGSPEDNEQKQLFVEQHKHYLDEIIEQISEFSKRVILADANLDKVLSAYNKHRDKPIREQAENIIHLFTLTNLGAPAAFKYFDTTIDRKRYTSTKEVLDATLIHQSITGLYETRIDLSQLGGDGGGSSEAAAKGGGGGTLNIEDEHRLHETSKEPDVSLGSTWLSDFPQAWAETGGMGLAVRQAPLIIPLKATSTPVSIKQYPMSQEARLGIKPHIQRLLDQGILVPCQSPWNTPLLPVKKPGTNDYRPVQDLREVNKRVEDIHPTVPNPYNLLSGLPPSHQWYTVLDLKDAFFCLRLHPTSQPLFAFEWRDPEMGISGQLTWTRLPQGFKNSPTLFNEALHRDLADFRIQHPDLILLQYVDDLLLAATSELDCQQGTRALLQTLGNLGYRASAKKAQICQKQVKYLGYLLKEGQRWLTEARKETVMGQPTPKTPRQLREFLGKAGFCRLFIPGFAEMAAPLYPLTKPGTLFNWGPDQQKAYQEIKQALLTAPALGLPDLTKPFELFVDEKQGYAKGVLTQKLGPWRRPVAYLSKKLDPVAAGWPPCLRMVAAIAVLTKDAGKLTMGQPLVILAPHAVEALVKQPPDRWLSNARMTHYQALLLDTDRVQFGPVVALNPATLLPLPEEGLQHNCLDILAEAHGTRPDLTDQPLPDADHTWYTDGSSLLQEGQRKAGAAVTTETEVIWAKALPAGTSAQRAELIALTQALKMAEGKKLNVYTDSRYAFATAHIHGEIYRRRGWLTSEGKEIKNKDEILALLKALFLPKRLSIIHCPGHQKGHSAEARGNRMADQAARKAAITETPDTSTLLAGKRTADGSEFEKRTADGSEFESPKKKAKVE

SEQ ID NO: 3073 - protein, 2091 aa, synthetic construct
  source 1..2091: note = Description of Artificial Sequence: Synthetic polypeptide
MPAAKRVKLDGGDKKYSIGLDIGTNSVGWAVITDEYKVPSKKFKVLGNTDRHSIKKNLIGALLFDSGETAEATRLKRTARRRYTRRKNRICYLQEIFSNEMAKVDDSFFHRLEESFLVEEDKKHERHPIFGNIVDEVAYHEKYPTIYHLRKKLVDSTDKADLRLIYLALAHMIKFRGHFLIEGDLNPDNSDVDKLFIQLVQTYNQLFEENPINASGVDAKAILSARLSKSRRLENLIAQLPGEKKNGLFGNLIALSLGLTPNFKSNFDLAEDAKLQLSKDTYDDDLDNLLAQIGDQYADLFLAAKNLSDAILLSDILRVNTEITKAPLSASMIKRYDEHHQDLTLLKALVRQQLPEKYKEIFFDQSKNGYAGYIDGGASQEEFYKFIKPILEKMDGTEELLVKLNREDLLRKQRTFDNGSIPHQIHLGELHAILRRQEDFYPFLKDNREKIEKILTFRIPYYVGPLARGNSRFAWMTRKSEETITPWNFEEVVDKGASAQSFIERMTNFDKNLPNEKVLPKHSLLYEYFTVYNELTKVKYVTEGMRKPAFLSGEQKKAIVDLLFKTNRKVTVKQLKEDYFKKIECFDSVEISGVEDRFNASLGTYHDLLKIIKDKDFLDNEENEDILEDIVLTLTLFEDREMIEERLKTYAHLFDDKVMKQLKRRRYTGWGRLSRKLINGIRDKQSGKTILDFLKSDGFANRNFMQLIHDDSLTFKEDIQKAQVSGQGDSLHEHIANLAGSPAIKKGILQTVKVVDELVKVMGRHKPENIVIEMARENQTTQKGQKNSRERMKRIEEGIKELGSQILKEHPVENTQLQNEKLYLYYLQNGRDMYVDQELDINRLSDYDVDHIVPQSFLKDDSIDNKVLTRSDKARGKSDNVPSEEVVKKMKNYWRQLLNAKLITQRKFDNLTKAERGGLSELDKAGFIKRQLVETRQITKHVAQILDSRMNTKYDENDKLIREVKVITLKSKLVSDFRKDFQFYKVREINNYHHAHDAYLNAVVGTALIKKYPKLESEFVYGDYKVYDVRKMIAKSEQEIGKATAKYFFYSNIMNFFKTEITLANGEIRKRPLIETNGETGEIVWDKGRDFATVRKVLSMPQVNIVKKTEVQTGGFSKESILPKRNSDKLIARKKDWDPKKYGGFDSPTVAYSVLVVAKVEKGKSKKLKSVKELLGITIMERSSFEKNPIDFLEAKGYKEVKKDLIIKLPKYSLFELENGRKRMLASAGELQKGNELALPSKYVNFLYLASHYEKLKGSPEDNEQKQLFVEQHKHYLDEIIEQISEFSKRVILADANLDKVLSAYNKHRDKPIREQAENIIHLFTLTNLGAPAAFKYFDTTIDRKRYTSTKEVLDATLIHQSITGLYETRIDLSQLGGDGGGGGPAPGGTLNIEDEHRLHETSKEPDVSLGSTWLSDFPQAWAETGGMGLAVRQAPLIIPLKATSTPVSIKQYPMSQEARLGIKPHIQRLLDQGILVPCQSPWNTPLLPVKKPGTNDYRPVQDLREVNKRVEDIHPTVPNPYNLLSGLPPSHQWYTVLDLKDAFFCLRLHPTSQPLFAFEWRDPEMGISGQLTWTRLPQGFKNSPTLFNEALHRDLADFRIQHPDLILLQYVDDLLLAATSELDCQQGTRALLQTLGNLGYRASAKKAQICQKQVKYLGYLLKEGQRWLTEARKETVMGQPTPKTPRQLREFLGKAGFCRLFIPGFAEMAAPLYPLTKPGTLFNWGPDQQKAYQEIKQALLTAPALGLPDLTKPFELFVDEKQGYAKGVLTQKLGPWRRPVAYLSKKLDPVAAGWPPCLRMVAAIAVLTKDAGKLTMGQPLVILAPHAVEALVKQPPDRWLSNARMTHYQALLLDTDRVQFGPVVALNPATLLPLPEEGLQHNCLDILAEAHGTRPDLTDQPLPDADHTWYTDGSSLLQEGQRKAGAAVTTETEVIWAKALPAGTSAQRAELIALTQALKMAEGKKLNVYTDSRYAFATAHIHGEIYRRRGWLTSEGKEIKNKDEILALLKALFLPKRLSIIHCPGHQKGHSAEARGNRMADQAARKAAITETPDTSTLLAGKRTADGSEFEKRTADGSEFESPKKKAKVE

SEQ ID NO: 3074 - protein, 2091 aa, synthetic construct; identical to SEQ ID NO: 2853
  source 1..2091: note = Description of Artificial Sequence: Synthetic polypeptide

SEQ ID NO: 3075 - protein, 2094 aa, synthetic construct
  source 1..2094: note = Description of Artificial Sequence: Synthetic polypeptide
MPAAKRVKLDGGDKKYSIGLDIGTNSVGWAVITDEYKVPSKKFKVLGNTDRHSIKKNLIGALLFDSGETAEATRLKRTARRRYTRRKNRICYLQEIFSNEMAKVDDSFFHRLEESFLVEEDKKHERHPIFGNIVDEVAYHEKYPTIYHLRKKLVDSTDKADLRLIYLALAHMIKFRGHFLIEGDLNPDNSDVDKLFIQLVQTYNQLFEENPINASGVDAKAILSARLSKSRRLENLIAQLPGEKKNGLFGNLIALSLGLTPNFKSNFDLAEDAKLQLSKDTYDDDLDNLLAQIGDQYADLFLAAKNLSDAILLSDILRVNTEITKAPLSASMIKRYDEHHQDLTLLKALVRQQLPEKYKEIFFDQSKNGYAGYIDGGASQEEFYKFIKPILEKMDGTEELLVKLNREDLLRKQRTFDNGSIPHQIHLGELHAILRRQEDFYPFLKDNREKIEKILTFRIPYYVGPLARGNSRFAWMTRKSEETITPWNFEEVVDKGASAQSFIERMTNFDKNLPNEKVLPKHSLLYEYFTVYNELTKVKYVTEGMRKPAFLSGEQKKAIVDLLFKTNRKVTVKQLKEDYFKKIECFDSVEISGVEDRFNASLGTYHDLLKIIKDKDFLDNEENEDILEDIVLTLTLFEDREMIEERLKTYAHLFDDKVMKQLKRRRYTGWGRLSRKLINGIRDKQSGKTILDFLKSDGFANRNFMQLIHDDSLTFKEDIQKAQVSGQGDSLHEHIANLAGSPAIKKGILQTVKVVDELVKVMGRHKPENIVIEMARENQTTQKGQKNSRERMKRIEEGIKELGSQILKEHPVENTQLQNEKLYLYYLQNGRDMYVDQELDINRLSDYDVDHIVPQSFLKDDSIDNKVLTRSDKARGKSDNVPSEEVVKKMKNYWRQLLNAKLITQRKFDNLTKAERGGLSELDKAGFIKRQLVETRQITKHVAQILDSRMNTKYDENDKLIREVKVITLKSKLVSDFRKDFQFYKVREINNYHHAHDAYLNAVVGTALIKKYPKLESEFVYGDYKVYDVRKMIAKSEQEIGKATAKYFFYSNIMNFFKTEITLANGEIRKRPLIETNGETGEIVWDKGRDFATVRKVLSMPQVNIVKKTEVQTGGFSKESILPKRNSDKLIARKKDWDPKKYGGFDSPTVAYSVLVVAKVEKGKSKKLKSVKELLGITIMERSSFEKNPIDFLEAKGYKEVKKDLIIKLPKYSLFELENGRKRMLASAGELQKGNELALPSKYVNFLYLASHYEKLKGSPEDNEQKQLFVEQHKHYLDEIIEQISEFSKRVILADANLDKVLSAYNKHRDKPIREQAENIIHLFTLTNLGAPAAFKYFDTTIDRKRYTSTKEVLDATLIHQSITGLYETRIDLSQLGGDGGGSSGGSPAPGGTLNIEDEHRLHETSKEPDVSLGSTWLSDFPQAWAETGGMGLAVRQAPLIIPLKATSTPVSIKQYPMSQEARLGIKPHIQRLLDQGILVPCQSPWNTPLLPVKKPGTNDYRPVQDLREVNKRVEDIHPTVPNPYNLLSGLPPSHQWYTVLDLKDAFFCLRLHPTSQPLFAFEWRDPEMGISGQLTWTRLPQGFKNSPTLFNEALHRDLADFRIQHPDLILLQYVDDLLLAATSELDCQQGTRALLQTLGNLGYRASAKKAQICQKQVKYLGYLLKEGQRWLTEARKETVMGQPTPKTPRQLREFLGKAGFCRLFIPGFAEMAAPLYPLTKPGTLFNWGPDQQKAYQEIKQALLTAPALGLPDLTKPFELFVDEKQGYAKGVLTQKLGPWRRPVAYLSKKLDPVAAGWPPCLRMVAAIAVLTKDAGKLTMGQPLVILAPHAVEALVKQPPDRWLSNARMTHYQALLLDTDRVQFGPVVALNPATLLPLPEEGLQHNCLDILAEAHGTRPDLTDQPLPDADHTWYTDGSSLLQEGQRKAGAAVTTETEVIWAKALPAGTSAQRAELIALTQALKMAEGKKLNVYTDSRYAFATAHIHGEIYRRRGWLTSEGKEIKNKDEILALLKALFLPKRLSIIHCPGHQKGHSAEARGNRMADQAARKAAITETPDTSTLLAGKRTADGSEFEKRTADGSEFESPKKKAKVE

SEQ ID NO: 3076 - protein, 2091 aa, synthetic construct; identical to SEQ ID NO: 2780
  source 1..2091: note = Description of Artificial Sequence: Synthetic polypeptide

SEQ ID NO: 3077 - protein, 2101 aa, synthetic construct; identical to SEQ ID NO: 2858
  source 1..2101: note = Description of Artificial Sequence: Synthetic polypeptide

SEQ ID NO: 3078 - protein, 2093 aa, synthetic construct; identical to SEQ ID NO: 2821
  source 1..2093: note = Description of Artificial Sequence: Synthetic polypeptide

SEQ ID NO: 3079 - protein, 2100 aa, synthetic construct; identical to SEQ ID NO: 2788
  source 1..2100: note = Description of Artificial Sequence: Synthetic polypeptide

SEQ ID NO: 3080 - protein, 2096 aa, synthetic construct
  source 1..2096: note = Description of Artificial Sequence: Synthetic polypeptide
MPAAKRVKLDGGDKKYSIGLDIGTNSVGWAVITDEYKVPSKKFKVLGNTDRHSIKKNLIGALLFDSGETAEATRLKRTARRRYTRRKNRICYLQEIFSNEMAKVDDSFFHRLEESFLVEEDKKHERHPIFGNIVDEVAYHEKYPTIYHLRKKLVDSTDKADLRLIYLALAHMIKFRGHFLIEGDLNPDNSDVDKLFIQLVQTYNQLFEENPINASGVDAKAILSARLSKSRRLENLIAQLPGEKKNGLFGNLIALSLGLTPNFKSNFDLAEDAKLQLSKDTYDDDLDNLLAQIGDQYADLFLAAKNLSDAILLSDILRVNTEITKAPLSASMIKRYDEHHQDLTLLKALVRQQLPEKYKEIFFDQSKNGYAGYIDGGASQEEFYKFIKPILEKMDGTEELLVKLNREDLLRKQRTFDNGSIPHQIHLGELHAILRRQEDFYPFLKDNREKIEKILTFRIPYYVGPLARGNSRFAWMTRKSEETITPWNFEEVVDKGASAQSFIERMTNFDKNLPNEKVLPKHSLLYEYFTVYNELTKVKYVTEGMRKPAFLSGEQKKAIVDLLFKTNRKVTVKQLKEDYFKKIECFDSVEISGVEDRFNASLGTYHDLLKIIKDKDFLDNEENEDILEDIVLTLTLFEDREMIEERLKTYAHLFDDKVMKQLKRRRYTGWGRLSRKLINGIRDKQSGKTILDFLKSDGFANRNFMQLIHDDSLTFKEDIQKAQVSGQGDSLHEHIANLAGSPAIKKGILQTVKVVDELVKVMGRHKPENIVIEMARENQTTQKGQKNSRERMKRIEEGIKELGSQILKEHPVENTQLQNEKLYLYYLQNGRDMYVDQELDINRLSDYDVDHIVPQSFLKDDSIDNKVLTRSDKARGKSDNVPSEEVVKKMKNYWRQLLNAKLITQRKFDNLTKAERGGLSELDKAGFIKRQLVETRQITKHVAQILDSRMNTKYDENDKLIREVKVITLKSKLVSDFRKDFQFYKVREINNYHHAHDAYLNAVVGTALIKKYPKLESEFVYGDYKVYDVRKMIAKSEQEIGKATAKYFFYSNIMNFFKTEITLANGEIRKRPLIETNGETGEIVWDKGRDFATVRKVLSMPQVNIVKKTEVQTGGFSKESILPKRNSDKLIARKKDWDPKKYGGFDSPTVAYSVLVVAKVEKGKSKKLKSVKELLGITIMERSSFEKNPIDFLEAKGYKEVKKDLIIKLPKYSLFELENGRKRMLASAGELQKGNELALPSKYVNFLYLASHYEKLKGSPEDNEQKQLFVEQHKHYLDEIIEQISEFSKRVILADANLDKVLSAYNKHRDKPIREQAENIIHLFTLTNLGAPAAFKYFDTTIDRKRYTSTKEVLDATLIHQSITGLYETRIDLSQLGGDGGEAAAKPAPGGSGGTLNIEDEHRLHETSKEPDVSLGSTWLSDFPQAWAETGGMGLAVRQAPLIIPLKATSTPVSIKQYPMSQEARLGIKPHIQRLLDQGILVPCQSPWNTPLLPVKKPGTNDYRPVQDLREVNKRVEDIHPTVPNPYNLLSGLPPSHQWYTVLDLKDAFFCLRLHPTSQPLFAFEWRDPEMGISGQLTWTRLPQGFKNSPTLFNEALHRDLADFRIQHPDLILLQYVDDLLLAATSELDCQQGTRALLQTLGNLGYRASAKKAQICQKQVKYLGYLLKEGQRWLTEARKETVMGQPTPKTPRQLREFLGKAGFCRLFIPGFAEMAAPLYPLTKPGTLFNWGPDQQKAYQEIKQALLTAPALGLPDLTKPFELFVDEKQGYAKGVLTQKLGPWRRPVAYLSKKLDPVAAGWPPCLRMVAAIAVLTKDAGKLTMGQPLVILAPHAVEALVKQPPDRWLSNARMTHYQALLLDTDRVQFGPVVALNPATLLPLPEEGLQHNCLDILAEAHGTRPDLTDQPLPDADHTWYTDGSSLLQEGQRKAGAAVTTETEVIWAKALPAGTSAQRAELIALTQALKMAEGKKLNVYTDSRYAFATAHIHGEIYRRRGWLTSEGKEIKNKDEILALLKALFLPKRLSIIHCPGHQKGHSAEARGNRMADQAARKAAITETPDTSTLLAGKRTADGSEFEKRTADGSEFESPKKKAKVE

SEQ ID NO: 3081 - protein, 2115 aa, synthetic construct; identical to SEQ ID NO: 2827
  source 1..2115: note = Description of Artificial Sequence: Synthetic polypeptide

SEQ ID NO: 3082 - protein, 2093 aa, synthetic construct; identical to SEQ ID NO: 2856
  source 1..2093: note = Description of Artificial Sequence: Synthetic polypeptide

SEQ ID NO: 3083 - protein, 2096 aa, synthetic construct; identical to SEQ ID NO: 2786
  source 1..2096: note = Description of Artificial Sequence: Synthetic polypeptide

SEQ ID NO: 3084 - protein, 2098 aa, synthetic construct; identical to SEQ ID NO: 2797
  source 1..2098: note = Description of Artificial Sequence: Synthetic polypeptide

SEQ ID NO: 3085 - protein, 2096 aa, synthetic construct; identical to SEQ ID NO: 2830
  source 1..2096: note = Description of Artificial Sequence: Synthetic polypeptide

SEQ ID NO: 3086 - protein, 2094 aa, synthetic construct
  source 1..2094: note = Description of Artificial Sequence: Synthetic polypeptide
MPAAKRVKLDGGDKKYSIGLDIGTNSVGWAVITDEYKVPSKKFKVLGNTDRHSIKKNLIGALLFDSGETAEATRLKRTARRRYTRRKNRICYLQEIFSNEMAKVDDSFFHRLEESFLVEEDKKHERHPIFGNIVDEVAYHEKYPTIYHLRKKLVDSTDKADLRLIYLALAHMIKFRGHFLIEGDLNPDNSDVDKLFIQLVQTYNQLFEENPINASGVDAKAILSARLSKSRRLENLIAQLPGEKKNGLFGNLIALSLGLTPNFKSNFDLAEDAKLQLSKDTYDDDLDNLLAQIGDQYADLFLAAKNLSDAILLSDILRVNTEITKAPLSASMIKRYDEHHQDLTLLKALVRQQLPEKYKEIFFDQSKNGYAGYIDGGASQEEFYKFIKPILEKMDGTEELLVKLNREDLLRKQRTFDNGSIPHQIHLGELHAILRRQEDFYPFLKDNREKIEKILTFRIPYYVGPLARGNSRFAWMTRKSEETITPWNFEEVVDKGASAQSFIERMTNFDKNLPNEKVLPKHSLLYEYFTVYNELTKVKYVTEGMRKPAFLSGEQKKAIVDLLFKTNRKVTVKQLKEDYFKKIECFDSVEISGVEDRFNASLGTYHDLLKIIKDKDFLDNEENEDILEDIVLTLTLFEDREMIEERLKTYAHLFDDKVMKQLKRRRYTGWGRLSRKLINGIRDKQSGKTILDFLKSDGFANRNFMQLIHDDSLTFKEDIQKAQVSGQGDSLHEHIANLAGSPAIKKGILQTVKVVDELVKVMGRHKPENIVIEMARENQTTQKGQKNSRERMKRIEEGIKELGSQILKEHPVENTQLQNEKLYLYYLQNGRDMYVDQELDINRLSDYDVDHIVPQSFLKDDSIDNKVLTRSDKARGKSDNVPSEEVVKKMKNYWRQLLNAKLITQRKFDNLTKAERGGLSELDKAGFIKRQLVETRQITKHVAQILDSRMNTKYDENDKLIREVKVITLKSKLVSDFRKDFQFYKVREINNYHHAHDAYLNAVVGTALIKKYPKLESEFVYGDYKVYDVRKMIAKSEQEIGKATAKYFFYSNIMNFFKTEITLANGEIRKRPLIETNGETGEIVWDKGRDFATVRKVLSMPQVNIVKKTEVQTGGFSKESILPKRNSDKLIARKKDWDPKKYGGFDSPTVAYSVLVVAKVEKGKSKKLKSVKELLGITIMERSSFEKNPIDFLEAKGYKEVKKDLIIKLPKYSLFELENGRKRMLASAGELQKGNELALPSKYVNFLYLASHYEKLKGSPEDNEQKQLFVEQHKHYLDEIIEQISEFSKRVILADANLDKVLSAYNKHRDKPIREQAENIIHLFTLTNLGAPAAFKYFDTTIDRKRYTSTKEVLDATLIHQSITGLYETRIDLSQLGGDGGPAPAPAPAPGGTLNIEDEHRLHETSKEPDVSLGSTWLSDFPQAWAETGGMGLAVRQAPLIIPLKATSTPVSIKQYPMSQEARLGIKPHIQRLLDQGILVPCQSPWNTPLLPVKKPGTNDYRPVQDLREVNKRVEDIHPTVPNPYNLLSGLPPSHQWYTVLDLKDAFFCLRLHPTSQPLFAFEWRDPEMGISGQLTWTRLPQGFKNSPTLFNEALHRDLADFRIQHPDLILLQYVDDLLLAATSELDCQQGTRALLQTLGNLGYRASAKKAQICQKQVKYLGYLLKEGQRWLTEARKETVMGQPTPKTPRQLREFLGKAGFCRLFIPGFAEMAAPLYPLTKPGTLFNWGPDQQKAYQEIKQALLTAPALGLPDLTKPFELFVDEKQGYAKGVLTQKLGPWRRPVAYLSKKLDPVAAGWPPCLRMVAAIAVLTKDAGKLTMGQPLVILAPHAVEALVKQPPDRWLSNARMTHYQALLLDTDRVQFGPVVALNPATLLPLPEEGLQHNCLDILAEAHGTRPDLTDQPLPDADHTWYTDGSSLLQEGQRKAGAAVTTETEVIWAKALPAGTSAQRAELIALTQALKMAEGKKLNVYTDSRYAFATAHIHGEIYRRRGWLTSEGKEIKNKDEILALLKALFLPKRLSIIHCPGHQKGHSAEARGNRMADQAARKAAITETPDTSTLLAGKRTADGSEFEKRTADGSEFESPKKKAKVE

SEQ ID NO: 3087 - protein, 2091 aa, synthetic construct; identical to SEQ ID NO: 2808
  source 1..2091: note = Description of Artificial Sequence: Synthetic polypeptide

SEQ ID NO: 3088 - protein, 2096 aa, synthetic construct; identical to SEQ ID NO: 2857
  source 1..2096: note = Description of Artificial Sequence: Synthetic polypeptide

SEQ ID NO: 3089 - protein, 2091 aa, synthetic construct; identical to SEQ ID NO: 2855
  source 1..2091: note = Description of Artificial Sequence: Synthetic polypeptide

SEQ ID NO: 3090 - protein, 2094 aa, synthetic construct; identical to SEQ ID NO: 2847
  source 1..2094: note = Description of Artificial Sequence: Synthetic polypeptide

SEQ ID NO: 3091 - protein, 2096 aa, synthetic construct; identical to SEQ ID NO: 2798
  source 1..2096: note = Description of Artificial Sequence: Synthetic polypeptide

SEQ ID NO: 3092 - protein, 2100 aa, synthetic construct; identical to SEQ ID NO: 2819
  source 1..2100: note = Description of Artificial Sequence: Synthetic polypeptide

SEQ ID NO: 3093 - protein, 2094 aa, synthetic construct; identical to SEQ ID NO: 2835
  source 1..2094: note = Description of Artificial Sequence: Synthetic polypeptide

SEQ ID NO: 3094 - protein, 2089 aa, synthetic construct
  source 1..2089: note = Description of Artificial Sequence: Synthetic polypeptide
MPAAKRVKLDGGDKKYSIGLDIGTNSVGWAVITDEYKVPSKKFKVLGNTDRHSIKKNLIGALLFDSGETAEATRLKRTARRRYTRRKNRICYLQEIFSNEMAKVDDSFFHRLEESFLVEEDKKHERHPIFGNIVDEVAYHEKYPTIYHLRKKLVDSTDKADLRLIYLALAHMIKFRGHFLIEGDLNPDNSDVDKLFIQLVQTYNQLFEENPINASGVDAKAILSARLSKSRRLENLIAQLPGEKKNGLFGNLIALSLGLTPNFKSNFDLAEDAKLQLSKDTYDDDLDNLLAQIGDQYADLFLAAKNLSDAILLSDILRVNTEITKAPLSASMIKRYDEHHQDLTLLKALVRQQLPEKYKEIFFDQSKNGYAGYIDGGASQEEFYKFIKPILEKMDGTEELLVKLNREDLLRKQRTFDNGSIPHQIHLGELHAILRRQEDFYPFLKDNREKIEKILTFRIPYYVGPLARGNSRFAWMTRKSEETITPWNFEEVVDKGASAQSFIERMTNFDKNLPNEKVLPKHSLLYEYFTVYNELTKVKYVTEGMRKPAFLSGEQKKAIVDLLFKTNRKVTVKQLKEDYFKKIECFDSVEISGVEDRFNASLGTYHDLLKIIKDKDFLDNEENEDILEDIVLTLTLFEDREMIEERLKTYAHLFDDKVMKQLKRRRYTGWGRLSRKLINGIRDKQSGKTILDFLKSDGFANRNFMQLIHDDSLTFKEDIQKAQVSGQGDSLHEHIANLAGSPAIKKGILQTVKVVDELVKVMGRHKPENIVIEMARENQTTQKGQKNSRERMKRIEEGIKELGSQILKEHPVENTQLQNEKLYLYYLQNGRDMYVDQELDINRLSDYDVDHIVPQSFLKDDSIDNKVLTRSDKARGKSDNVPSEEVVKKMKNYWRQLLNAKLITQRKFDNLTKAERGGLSELDKAGFIKRQLVETRQITKHVAQILDSRMNTKYDENDKLIREVKVITLKSKLVSDFRKDFQFYKVREINNYHHAHDAYLNAVVGTALIKKYPKLESEFVYGDYKVYDVRKMIAKSEQEIGKATAKYFFYSNIMNFFKTEITLANGEIRKRPLIETNGETGEIVWDKGRDFATVRKVLSMPQVNIVKKTEVQTGGFSKESILPKRNSDKLIARKKDWDPKKYGGFDSPTVAYSVLVVAKVEKGKSKKLKSVKELLGITIMERSSFEKNPIDFLEAKGYKEVKKDLIIKLPKYSLFELENGRKRMLASAGELQKGNELALPSKYVNFLYLASHYEKLKGSPEDNEQKQLFVEQHKHYLDEIIEQISEFSKRVILADANLDKVLSAYNKHRDKPIREQAENIIHLFTLTNLGAPAAFKYFDTTIDRKRYTSTKEVLDATLIHQSITGLYETRIDLSQLGGDGGGGGGGGTLNIEDEHRLHETSKEPDVSLGSTWLSDFPQAWAETGGMGLAVRQAPLIIPLKATSTPVSIKQYPMSQEARLGIKPHIQRLLDQGILVPCQSPWNTPLLPVKKPGTNDYRPVQDLREVNKRVEDIHPTVPNPYNLLSGLPPSHQWYTVLDLKDAFFCLRLHPTSQPLFAFEWRDPEMGISGQLTWTRLPQGFKNSPTLFNEALHRDLADFRIQHPDLILLQYVDDLLLAATSELDCQQGTRALLQTLGNLGYRASAKKAQICQKQVKYLGYLLKEGQRWLTEARKETVMGQPTPKTPRQLREFLGKAGFCRLFIPGFAEMAAPLYPLTKPGTLFNWGPDQQKAYQEIKQALLTAPALGLPDLTKPFELFVDEKQGYAKGVLTQKLGPWRRPVAYLSKKLDPVAAGWPPCLRMVAAIAVLTKDAGKLTMGQPLVILAPHAVEALVKQPPDRWLSNARMTHYQALLLDTDRVQFGPVVALNPATLLPLPEEGLQHNCLDILAEAHGTRPDLTDQPLPDADHTWYTDGSSLLQEGQRKAGAAVTTETEVIWAKALPAGTSAQRAELIALTQALKMAEGKKLNVYTDSRYAFATAHIHGEIYRRRGWLTSEGKEIKNKDEILALLKALFLPKRLSIIHCPGHQKGHSAEARGNRMADQAARKAAITETPDTSTLLAGKRTADGSEFEKRTADGSEFESPKKKAKVE

SEQ ID NO: 3095 - protein, 2088 aa, synthetic construct
  source 1..2088: note = Description of Artificial Sequence: Synthetic polypeptide
MPAAKRVKLDGGDKKYSIGLDIGTNSVGWAVITDEYKVPSKKFKVLGNTDRHSIKKNLIGALLFDSGETAEATRLKRTARRRYTRRKNRICYLQEIFSNEMAKVDDSFFHRLEESFLVEEDKKHERHPIFGNIVDEVAYHEKYPTIYHLRKKLVDSTDKADLRLIYLALAHMIKFRGHFLIEGDLNPDNSDVDKLFIQLVQTYNQLFEENPINASGVDAKAILSARLSKSRRLENLIAQLPGEKKNGLFGNLIALSLGLTPNFKSNFDLAEDAKLQLSKDTYDDDLDNLLAQIGDQYADLFLAAKNLSDAILLSDILRVNTEITKAPLSASMIKRYDEHHQDLTLLKALVRQQLPEKYKEIFFDQSKNGYAGYIDGGASQEEFYKFIKPILEKMDGTEELLVKLNREDLLRKQRTFDNGSIPHQIHLGELHAILRRQEDFYPFLKDNREKIEKILTFRIPYYVGPLARGNSRFAWMTRKSEETITPWNFEEVVDKGASAQSFIERMTNFDKNLPNEKVLPKHSLLYEYFTVYNELTKVKYVTEGMRKPAFLSGEQKKAIVDLLFKTNRKVTVKQLKEDYFKKIECFDSVEISGVEDRFNASLGTYHDLLKIIKDKDFLDNEENEDILEDIVLTLTLFEDREMIEERLKTYAHLFDDKVMKQLKRRRYTGWGRLSRKLINGIRDKQSGKTILDFLKSDGFANRNFMQLIHDDSLTFKEDIQKAQVSGQGDSLHEHIANLAGSPAIKKGILQTVKVVDELVKVMGRHKPENIVIEMARENQTTQKGQKNSRERMKRIEEGIKELGSQILKEHPVENTQLQNEKLYLYYLQNGRDMYVDQELDINRLSDYDVDHIVPQSFLKDDSIDNKVLTRSDKARGKSDNVPSEEVVKKMKNYWRQLLNAKLITQRKFDNLTKAERGGLSELDKAGFIKRQLVETRQITKHVAQILDSRMNTKYDENDKLIREVKVITLKSKLVSDFRKDFQFYKVREINNYHHAHDAYLNAVVGTALIKKYPKLESEFVYGDYKVYDVRKMIAKSEQEIGKATAKYFFYSNIMNFFKTEITLANGEIRKRPLIETNGETGEIVWDKGRDFATVRKVLSMPQVNIVKKTEVQTGGFSKESILPKRNSDKLIARKKDWDPKKYGGFDSPTVAYSVLVVAKVEKGKSKKLKSVKELLGITIMERSSFEKNPIDFLEAKGYKEVKKDLIIKLPKYSLFELENGRKRMLASAGELQKGNELALPSKYVNFLYLASHYEKLKGSPEDNEQKQLFVEQHKHYLDEIIEQISEFSKRVILADANLDKVLSAYNKHRDKPIREQAENIIHLFTLTNLGAPAAFKYFDTTIDRKRYTSTKEVLDATLIHQSITGLYETRIDLSQLGGDGGGGSGGTLNIEDEHRLHETSKEPDVSLGSTWLSDFPQAWAETGGMGLAVRQAPLIIPLKATSTPVSIKQYPMSQEARLGIKPHIQRLLDQGILVPCQSPWNTPLLPVKKPGTNDYRPVQDLREVNKRVEDIHPTVPNPYNLLSGLPPSHQWYTVLDLKDAFFCLRLHPTSQPLFAFEWRDPEMGISGQLTWTRLPQGFKNSPTLFNEALHRDLADFRIQHPDLILLQYVDDLLLAATSELDCQQGTRALLQTLGNLGYRASAKKAQICQKQVKYLGYLLKEGQRWLTEARKETVMGQPTPKTPRQLREFLGKAGFCRLFIPGFAEMAAPLYPLTKPGTLFNWGPDQQKAYQEIKQALLTAPALGLPDLTKPFELFVDEKQGYAKGVLTQKLGPWRRPVAYLSKKLDPVAAGWPPCLRMVAAIAVLTKDAGKLTMGQPLVILAPHAVEALVKQPPDRWLSNARMTHYQALLLDTDRVQFGPVVALNPATLLPLPEEGLQHNCLDILAEAHGTRPDLTDQPLPDADHTWYTDGSSLLQEGQRKAGAAVTTETEVIWAKALPAGTSAQRAELIALTQALKMAEGKKLNVYTDSRYAFATAHIHGEIYRRRGWLTSEGKEIKNKDEILALLKALFLPKRLSIIHCPGHQKGHSAEARGNRMADQAARKAAITETPDTSTLLAGKRTADGSEFEKRTADGSEFESPKKKAKVE

SEQ ID NO: 3096 - protein, 2092 aa, synthetic construct; identical to SEQ ID NO: 2790
  source 1..2092: note = Description of Artificial Sequence: Synthetic polypeptide

SEQ ID NO: 3097 - protein, 2093 aa, synthetic construct; identical to SEQ ID NO: 2849
  source 1..2093: note = Description of Artificial Sequence: Synthetic polypeptide

SEQ ID NO: 3098 - protein, 2094 aa, synthetic construct; identical to SEQ ID NO: 2793
  source 1..2094: note = Description of Artificial Sequence: Synthetic polypeptide

SEQ ID NO: 3099 - protein, 2100 aa, synthetic construct; identical to SEQ ID NO: 2836
  source 1..2100: note = Description of Artificial Sequence: Synthetic polypeptide

SEQ ID NO: 3100 - protein, 2092 aa, synthetic construct
  source 1..2092: note = Description of Artificial Sequence: Synthetic polypeptide
MPAAKRVKLDGGDKKYSIGLDIGTNSVGWAVITDEYKVPSKKFKVLGNTDRHSIKKNLIGALLFDSGETAEATRLKRTARRRYTRRKNRICYLQEIFSNEMAKVDDSFFHRLEESFLVEEDKKHERHPIFGNIVDEVAYHEKYPTIYHLRKKLVDSTDKADLRLIYLALAHMIKFRGHFLIEGDLNPDNSDVDKLFIQLVQTYNQLFEENPINASGVDAKAILSARLSKSRRLENLIAQLPGEKKNGLFGNLIALSLGLTPNFKSNFDLAEDAKLQLSKDTYDDDLDNLLAQIGDQYADLFLAAKNLSDAILLSDILRVNTEITKAPLSASMIKRYDEHHQDLTLLKALVRQQLPEKYKEIFFDQSKNGYAGYIDGGASQEEFYKFIKPILEKMDGTEELLVKLNREDLLRKQRTFDNGSIPHQIHLGELHAILRRQEDFYPFLKDNREKIEKILTFRIPYYVGPLARGNSRFAWMTRKSEETITPWNFEEVVDKGASAQSFIERMTNFDKNLPNEKVLPKHSLLYEYFTVYNELTKVKYVTEGMRKPAFLSGEQKKAIVDLLFKTNRKVTVKQLKEDYFKKIECFDSVEISGVEDRFNASLGTYHDLLKIIKDKDFLDNEENEDILEDIVLTLTLFEDREMIEERLKTYAHLFDDKVMKQLKRRRYTGWGRLSRKLINGIRDKQSGKTILDFLKSDGFANRNFMQLIHDDSLTFKEDIQKAQVSGQGDSLHEHIANLAGSPAIKKGILQTVKVVDELVKVMGRHKPENIVIEMARENQTTQKGQKNSRERMKRIEEGIKELGSQILKEHPVENTQLQNEKLYLYYLQNGRDMYVDQELDINRLSDYDVDHIVPQSFLKDDSIDNKVLTRSDKARGKSDNVPSEEVVKKMKNYWRQLLNAKLITQRKFDNLTKAERGGLSELDKAGFIKRQLVETRQITKHVAQILDSRMNTKYDENDKLIREVKVITLKSKLVSDFRKDFQFYKVREINNYHHAHDAYLNAVVGTALIKKYPKLESEFVYGDYKVYDVRKMIAKSEQEIGKATAKYFFYSNIMNFFKTEITLANGEIRKRPLIETNGETGEIVWDKGRDFATVRKVLSMPQVNIVKKTEVQTGGFSKESILPKRNSDKLIARKKDWDPKKYGGFDSPTVAYSVLVVAKVEKGKSKKLKSVKELLGITIMERSSFEKNPIDFLEAKGYKEVKKDLIIKLPKYSLFELENGRKRMLASAGELQKGNELALPSKYVNFLYLASHYEKLKGSPEDNEQKQLFVEQHKHYLDEIIEQISEFSKRVILADANLDKVLSAYNKHRDKPIREQAENIIHLFTLTNLGAPAAFKYFDTTIDRKRYTSTKEVLDATLIHQSITGLYETRIDLSQLGGDGGPAPAPAPGGTLNIEDEHRLHETSKEPDVSLGSTWLSDFPQAWAETGGMGLAVRQAPLIIPLKATSTPVSIKQYPMSQEARLGIKPHIQRLLDQGILVPCQSPWNTPLLPVKKPGTNDYRPVQDLREVNKRVEDIHPTVPNPYNLLSGLPPSHQWYTVLDLKDAFFCLRLHPTSQPLFAFEWRDPEMGISGQLTWTRLPQGFKNSPTLFNEALHRDLADFRIQHPDLILLQYVDDLLLAATSELDCQQGTRALLQTLGNLGYRASAKKAQICQKQVKYLGYLLKEGQRWLTEARKETVMGQPTPKTPRQLREFLGKAGFCRLFIPGFAEMAAPLYPLTKPGTLFNWGPDQQKAYQEIKQALLTAPALGLPDLTKPFELFVDEKQGYAKGVLTQKLGPWRRPVAYLSKKLDPVAAGWPPCLRMVAAIAVLTKDAGKLTMGQPLVILAPHAVEALVKQPPDRWLSNARMTHYQALLLDTDRVQFGPVVALNPATLLPLPEEGLQHNCLDILAEAHGTRPDLTDQPLPDADHTWYTDGSSLLQEGQRKAGAAVTTETEVIWAKALPAGTSAQRAELIALTQALKMAEGKKLNVYTDSRYAFATAHIHGEIYRRRGWLTSEGKEIKNKDEILALLKALFLPKRLSIIHCPGHQKGHSAEARGNRMADQAARKAAITETPDTSTLLAGKRTADGSEFEKRTADGSEFESPKKKAKVE

SEQ ID NO: 3101 - protein, 2094 aa, synthetic construct; identical to SEQ ID NO: 2846
  source 1..2094: note = Description of Artificial Sequence: Synthetic polypeptide

SEQ ID NO: 3102 - protein, 2096 aa, synthetic construct; identical to SEQ ID NO: 2842
  source 1..2096: note = Description of Artificial Sequence: Synthetic polypeptide

SEQ ID NO: 3103 - protein, 2096 aa, synthetic construct; identical to SEQ ID NO: 2815
  source 1..2096: note = Description of Artificial Sequence: Synthetic polypeptide

SEQ ID NO: 3104 - protein, 2096 aa, synthetic construct
  source 1..2096: note = Description of Artificial Sequence: Synthetic polypeptide
MPAAKRVKLDGGDKKYSIGLDIGTNSVGWAVITDEYKVPSKKFKVLGNTDRHSIKKNLIGALLFDSGETAEATRLKRTARRRYTRRKNRICYLQEIFSNEMAKVDDSFFHRLEESFLVEEDKKHERHPIFGNIVDEVAYHEKYPTIYHLRKKLVDSTDKADLRLIYLALAHMIKFRGHFLIEGDLNPDNSDVDKLFIQLVQTYNQLFEENPINASGVDAKAILSARLSKSRRLENLIAQLPGEKKNGLFGNLIALSLGLTPNFKSNFDLAEDAKLQLSKDTYDDDLDNLLAQIGDQYADLFLAAKNLSDAILLSDILRVNTEITKAPLSASMIKRYDEHHQDLTLLKALVRQQLPEKYKEIFFDQSKNGYAGYIDGGASQEEFYKFIKPILEKMDGTEELLVKLNREDLLRKQRTFDNGSIPHQIHLGELHAILRRQEDFYPFLKDNREKIEKILTFRIPYYVGPLARGNSRFAWMTRKSEETITPWNFEEVVDKGASAQSFIERMTNFDKNLPNEKVLPKHSLLYEYFTVYNELTKVKYVTEGMRKPAFLSGEQKKAIVDLLFKTNRKVTVKQLKEDYFKKIECFDSVEISGVEDRFNASLGTYHDLLKIIKDKDFLDNEENEDILEDIVLTLTLFEDREMIEERLKTYAHLFDDKVMKQLKRRRYTGWGRLSRKLINGIRDKQSGKTILDFLKSDGFANRNFMQLIHDDSLTFKEDIQKAQVSGQGDSLHEHIANLAGSPAIKKGILQTVKVVDELVKVMGRHKPENIVIEMARENQTTQKGQKNSRERMKRIEEGIKELGSQILKEHPVENTQLQNEKLYLYYLQNGRDMYVDQELDINRLSDYDVDHIVPQSFLKDDSIDNKVLTRSDKARGKSDNVPSEEVVKKMKNYWRQLLNAKLITQRKFDNLTKAERGGLSELDKAGFIKRQLVETRQITKHVAQILDSRMNTKYDENDKLIREVKVITLKSKLVSDFRKDFQFYKVREINNYHHAHDAYLNAVVGTALIKKYPKLESEFVYGDYKVYDVRKMIAKSEQEIGKATAKYFFYSNIMNFFKTEITLANGEIRKRPLIETNGETGEIVWDKGRDFATVRKVLSMPQVNIVKKTEVQTGGFSKESILPKRNSDKLIARKKDWDPKKYGGFDSPTVAYSVLVVAKVEKGKSKKLKSVKELLGITIMERSSFEKNPIDFLEAKGYKEVKKDLIIKLPKYSLFELENGRKRMLASAGELQKGNELALPSKYVNFLYLASHYEKLKGSPEDNEQKQLFVEQHKHYLDEIIEQISEFSKRVILADANLDKVLSAYNKHRDKPIREQAENIIHLFTLTNLGAPAAFKYFDTTIDRKRYTSTKEVLDATLIHQSITGLYETRIDLSQLGGDGGPAPEAAAKGSSGGTLNIEDEHRLHETSKEPDVSLGSTWLSDFPQAWAETGGMGLAVRQAPLIIPLKATSTPVSIKQYPMSQEARLGIKPHIQRLLDQGILVPCQSPWNTPLLPVKKPGTNDYRPVQDLREVNKRVEDIHPTVPNPYNLLSGLPPSHQWYTVLDLKDAFFCLRLHPTSQPLFAFEWRDPEMGISGQLTWTRLPQGFKNSPTLFNEALHRDLADFRIQHPDLILLQYVDDLLLAATSELDCQQGTRALLQTLGNLGYRASAKKAQICQKQVKYLGYLLKEGQRWLTEARKETVMGQPTPKTPRQLREFLGKAGFCRLFIPGFAEMAAPLYPLTKPGTLFNWGPDQQKAYQEIKQALLTAPALGLPDLTKPFELFVDEKQGYAKGVLTQKLGPWRRPVAYLSKKLDPVAAGWPPCLRMVAAIAVLTKDAGKLTMGQPLVILAPHAVEALVKQPPDRWLSNARMTHYQALLLDTDRVQFGPVVALNPATLLPLPEEGLQHNCLDILAEAHGTRPDLTDQPLPDADHTWYTDGSSLLQEGQRKAGAAVTTETEVIWAKALPAGTSAQRAELIALTQALKMAEGKKLNVYTDSRYAFATAHIHGEIYRRRGWLTSEGKEIKNKDEILALLKALFLPKRLSIIHCPGHQKGHSAEARGNRMADQAARKAAITETPDTSTLLAGKRTADGSEFEKRTADGSEFESPKKKAKVE

SEQ ID NO: 3105 - protein, 2096 aa, synthetic construct
  source 1..2096: note = Description of Artificial Sequence: Synthetic polypeptide
MPAAKRVKLDGGDKKYSIGLDIGTNSVGWAVITDEYKVPSKKFKVLGNTDRHSIKKNLIGALLFDSGETAEATRLKRTARRRYTRRKNRICYLQEIFSNEMAKVDDSFFHRLEESFLVEEDKKHERHPIFGNIVDEVAYHEKYPTIYHLRKKLVDSTDKADLRLIYLALAHMIKFRGHFLIEGDLNPDNSDVDKLFIQLVQTYNQLFEENPINASGVDAKAILSARLSKSRRLENLIAQLPGEKKNGLFGNLIALSLGLTPNFKSNFDLAEDAKLQLSKDTYDDDLDNLLAQIGDQYADLFLAAKNLSDAILLSDILRVNTEITKAPLSASMIKRYDEHHQDLTLLKALVRQQLPEKYKEIFFDQSKNGYAGYIDGGASQEEFYKFIKPILEKMDGTEELLVKLNREDLLRKQRTFDNGSIPHQIHLGELHAILRRQEDFYPFLKDNREKIEKILTFRIPYYVGPLARGNSRFAWMTRKSEETITPWNFEEVVDKGASAQSFIERMTNFDKNLPNEKVLPKHSLLYEYFTVYNELTKVKYVTEGMRKPAFLSGEQKKAIVDLLFKTNRKVTVKQLKEDYFKKIECFDSVEISGVEDRFNASLGTYHDLLKIIKDKDFLDNEENEDILEDIVLTLTLFEDREMIEERLKTYAHLFDDKVMKQLKRRRYTGWGRLSRKLINGIRDKQSGKTILDFLKSDGFANRNFMQLIHDDSLTFKEDIQKAQVSGQGDSLHEHIANLAGSPAIKKGILQTVKVVDELVKVMGRHKPENIVIEMARENQTTQKGQKNSRERMKRIEEGIKELGSQILKEHPVENTQLQNEKLYLYYLQNGRDMYVDQELDINRLSDYDVDHIVPQSFLKDDSIDNKVLTRSDKARGKSDNVPSEEVVKKMKNYWRQLLNAKLITQRKFDNLTKAERGGLSELDKAGFIKRQLVETRQITKHVAQILDSRMNTKYDENDKLIREVKVITLKSKLVSDFRKDFQFYKVREINNYHHAHDAYLNAVVGTALIKKYPKLESEFVYGDYKVYDVRKMIAKSEQEIGKATAKYFFYSNIMNFFKTEITLANGEIRKRPLIETNGETGEIVWDKGRDFATVRKVLSMPQVNIVKKTEVQTGGFSKESILPKRNSDKLIARKKDWDPKKYGGFDSPTVAYSVLVVAKVEKGKSKKLKSVKELLGITIMERSSFEKNPIDFLEAKGYKEVKKDLIIKLPKYSLFELENGRKRMLASAGELQKGNELALPSKYVNFLYLASHYEKLKGSPEDNEQKQLFVEQHKHYLDEIIEQISEFSKRVILADANLDKVLSAYNKHRDKPIREQAENIIHLFTLTNLGAPAAFKYFDTTIDRKRYTSTKEVLDATLIHQSITGLYETRIDLSQLGGDGGGSSEAAAKPAPGGTLNIEDEHRLHETSKEPDVSLGSTWLSDFPQAWAETGGMGLAVRQAPLIIPLKATSTPVSIKQYPMSQEARLGIKPHIQRLLDQGILVPCQSPWNTPLLPVKKPGTNDYRPVQDLREVNKRVEDIHPTVPNPYNLLSGLPPSHQWYTVLDLKDAFFCLRLHPTSQPLFAFEWRDPEMGISGQLTWTRLPQGFKNSPTLFNEALHRDLADFRIQHPDLILLQYVDDLLLAATSELDCQQGTRALLQTLGNLGYRASAKKAQICQKQVKYLGYLLKEGQRWLTEARKETVMGQPTPKTPRQLREFLGKAGFCRLFIPGFAEMAAPLYPLTKPGTLFNWGPDQQKAYQEIKQALLTAPALGLPDLTKPFELFVDEKQGYAKGVLTQKLGPWRRPVAYLSKKLDPVAAGWPPCLRMVAAIAVLTKDAGKLTMGQPLVILAPHAVEALVKQPPDRWLSNARMTHYQALLLDTDRVQFGPVVALNPATLLPLPEEGLQHNCLDILAEAHGTRPDLTDQPLPDADHTWYTDGSSLLQEGQRKAGAAVTTETEVIWAKALPAGTSAQRAELIALTQALKMAEGKKLNVYTDSRYAFATAHIHGEIYRRRGWLTSEGKEIKNKDEILALLKALFLPKRLSIIHCPGHQKGHSAEARGNRMADQAARKAAITETPDTSTLLAGKRTADGSEFEKRTADGSEFESPKKKAKVE

SEQ ID NO: 3106 - protein, 2094 aa, synthetic construct
  source 1..2094: note = Description of Artificial Sequence: Synthetic polypeptide
MPAAKRVKLDGGDKKYSIGLDIGTNSVGWAVITDEYKVPSKKFKVLGNTDRHSIKKNLIGALLFDSGETAEATRLKRTARRRYTRRKNRICYLQEIFSNEMAKVDDSFFHRLEESFLVEEDKKHERHPIFGNIVDEVAYHEKYPTIYHLRKKLVDSTDKADLRLIYLALAHMIKFRGHFLIEGDLNPDNSDVDKLFIQLVQTYNQLFEENPINASGVDAKAILSARLSKSRRLENLIAQLPGEKKNGLFGNLIALSLGLTPNFKSNFDLAEDAKLQLSKDTYDDDLDNLLAQIGDQYADLFLAAKNLSDAILLSDILRVNTEITKAPLSASMIKRYDEHHQDLTLLKALVRQQLPEKYKEIFFDQSKNGYAGYIDGGASQEEFYKFIKPILEKMDGTEELLVKLNREDLLRKQRTFDNGSIPHQIHLGELHAILRRQEDFYPFLKDNREKIEKILTFRIPYYVGPLARGNSRFAWMTRKSEETITPWNFEEVVDKGASAQSFIERMTNFDKNLPNEKVLPKHSLLYEYFTVYNELTKVKYVTEGMRKPAFLSGEQKKAIVDLLFKTNRKVTVKQLKEDYFKKIECFDSVEISGVEDRFNASLGTYHDLLKIIKDKDFLDNEENEDILEDIVLTLTLFEDREMIEERLKTYAHLFDDKVMKQLKRRRYTGWGRLSRKLINGIRDKQSGKTILDFLKSDGFANRNFMQLIHDDSLTFKEDIQKAQVSGQGDSLHEHIANLAGSPAIKKGILQTVKVVDELVKVMGRHKPENIVIEMARENQTTQKGQKNSRERMKRIEEGIKELGSQILKEHPVENTQLQNEKLYLYYLQNGRDMYVDQELDINRLSDYDVDHIVPQSFLKDDSIDNKVLTRSDKARGKSDNVPSEEVVKKMKNYWRQLLNAKLITQRKFDNLTKAERGGLSELDKAGFIKRQLVETRQITKHVAQILDSRMNTKYDENDKLIREVKVITLKSKLVSDFRKDFQFYKVREINNYHHAHDAYLNAVVGTALIKKYPKLESEFVYGDYKVYDVRKMIAKSEQEIGKATAKYFFYSNIMNFFKTEITLANGEIRKRPLIETNGETGEIVWDKGRDFATVRKVLSMPQVNIVKKTEVQTGGFSKESILPKRNSDKLIARKKDWDPKKYGGFDSPTVAYSVLVVAKVEKGKSKKLKSVKELLGITIMERSSFEKNPIDFLEAKGYKEVKKDLIIKLPKYSLFELENGRKRMLASAGELQKGNELALPSKYVNFLYLASHYEKLKGSPEDNEQKQLFVEQHKHYLDEIIEQISEFSKRVILADANLDKVLSAYNKHRDKPIREQAENIIHLFTLTNLGAPAAFKYFDTTIDRKRYTSTKEVLDATLIHQSITGLYETRIDLSQLGGDGGPAPGSSGGSGGTLNIEDEHRLHETSKEPDVSLGSTWLSDFPQAWAETGGMGLAVRQAPLIIPLKATSTPVSIKQYPMSQEARLGIKPHIQRLLDQGILVPCQSPWNTPLLPVKKPGTNDYRPVQDLREVNKRVEDIHPTVPNPYNLLSGLPPSHQWYTVLDLKDAFFCLRLHPTSQPLFAFEWRDPEMGISGQLTWTRLPQGFKNSPTLFNEALHRDLADFRIQHPDLILLQYVDDLLLAATSELDCQQGTRALLQTLGNLGYRASAKKAQICQKQVKYLGYLLKEGQRWLTEARKETVMGQPTPKTPRQLREFLGKAGFCRLFIPGFAEMAAPLYPLTKPGTLFNWGPDQQKAYQEIKQALLTAPALGLPDLTKPFELFVDEKQGYAKGVLTQKLGPWRRPVAYLSKKLDPVAAGWPPCLRMVAAIAVLTKDAGKLTMGQPLVILAPHAVEALVKQPPDRWLSNARMTHYQALLLDTDRVQFGPVVALNPATLLPLPEEGLQHNCLDILAEAHGTRPDLTDQPLPDADHTWYTDGSSLLQEGQRKAGAAVTTETEVIWAKALPAGTSAQRAELIALTQALKMAEGKKLNVYTDSRYAFATAHIHGEIYRRRGWLTSEGKEIKNKDEILALLKALFLPKRLSIIHCPGHQKGHSAEARGNRMADQAARKAAITETPDTSTLLAGKRTADGSEFEKRTADGSEFESPKKKAKVE

SEQ ID NO: 3107 - protein, 2091 aa, synthetic construct; identical to SEQ ID NO: 2820
  source 1..2091: note = Description of Artificial Sequence: Synthetic polypeptide

SEQ ID NO: 3108 - protein, 2096 aa, synthetic construct; identical to SEQ ID NO: 2782
  source 1..2096: note = Description of Artificial Sequence: Synthetic polypeptide

SEQ ID NO: 3109 - protein, 2096 aa, synthetic construct; identical to SEQ ID NO: 2860
  source 1..2096: note = Description of Artificial Sequence: Synthetic polypeptide

SEQ ID NO: 3110 - protein, 2095 aa, synthetic construct
  source 1..2095: note = Description of Artificial Sequence: Synthetic polypeptide
MPAAKRVKLDGGDKKYSIGLDIGTNSVGWAVITDEYKVPSKKFKVLGNTDRHSIKKNLIGALLFDSGETAEATRLKRTARRRYTRRKNRICYLQEIFSNEMAKVDDSFFHRLEESFLVEEDKKHERHPIFGNIVDEVAYHEKYPTIYHLRKKLVDSTDKADLRLIYLALAHMIKFRGHFLIEGDLNPDNSDVDKLFIQLVQTYNQLFEENPINASGVDAKAILSARLSKSRRLENLIAQLPGEKKNGLFGNLIALSLGLTPNFKSNFDLAEDAKLQLSKDTYDDDLDNLLAQIGDQYADLFLAAKNLSDAILLSDILRVNTEITKAPLSASMIKRYDEHHQDLTLLKALVRQQLPEKYKEIFFDQSKNGYAGYIDGGASQEEFYKFIKPILEKMDGTEELLVKLNREDLLRKQRTFDNGSIPHQIHLGELHAILRRQEDFYPFLKDNREKIEKILTFRIPYYVGPLARGNSRFAWMTRKSEETITPWNFEEVVDKGASAQSFIERMTNFDKNLPNEKVLPKHSLLYEYFTVYNELTKVKYVTEGMRKPAFLSGEQKKAIVDLLFKTNRKVTVKQLKEDYFKKIECFDSVEISGVEDRFNASLGTYHDLLKIIKDKDFLDNEENEDILEDIVLTLTLFEDREMIEERLKTYAHLFDDKVMKQLKRRRYTGWGRLSRKLINGIRDKQSGKTILDFLKSDGFANRNFMQLIHDDSLTFKEDIQKAQVSGQGDSLHEHIANLAGSPAIKKGILQTVKVVDELVKVMGRHKPENIVIEMARENQTTQKGQKNSRERMKRIEEGIKELGSQILKEHPVENTQLQNEKLYLYYLQNGRDMYVDQELDINRLSDYDVDHIVPQSFLKDDSIDNKVLTRSDKARGKSDNVPSEEVVKKMKNYWRQLLNAKLITQRKFDNLTKAERGGLSELDKAGFIKRQLVETRQITKHVAQILDSRMNTKYDENDKLIREVKVITLKSKLVSDFRKDFQFYKVREINNYHHAHDAYLNAVVGTALIKKYPKLESEFVYGDYKVYDVRKMIAKSEQEIGKATAKYFFYSNIMNFFKTEITLANGEIRKRPLIETNGETGEIVWDKGRDFATVRKVLSMPQVNIVKKTEVQTGGFSKESILPKRNSDKLIARKKDWDPKKYGGFDSPTVAYSVLVVAKVEKGKSKKLKSVKELLGITIMERSSFEKNPIDFLEAKGYKEVKKDLIIKLPKYSLFELENGRKRMLASAGELQKGNELALPSKYVNFLYLASHYEKLKGSPEDNEQKQLFVEQHKHYLDEIIEQISEFSKRVILADANLDKVLSAYNKHRDKPIREQAENIIHLFTLTNLGAPAAFKYFDTTIDRKRYTSTKEVLDATLIHQSITGLYETRIDLSQLGGDGGGGGGSGGGGSGGTLNIEDEHRLHETSKEPDVSLGSTWLSDFPQAWAETGGMGLAVRQAPLIIPLKATSTPVSIKQYPMSQEARLGIKPHIQRLLDQGILVPCQSPWNTPLLPVKKPGTNDYRPVQDLREVNKRVEDIHPTVPNPYNLLSGLPPSHQWYTVLDLKDAFFCLRLHPTSQPLFAFEWRDPEMGISGQLTWTRLPQGFKNSPTLFNEALHRDLADFRIQHPDLILLQYVDDLLLAATSELDCQQGTRALLQTLGNLGYRASAKKAQICQKQVKYLGYLLKEGQRWLTEARKETVMGQPTPKTPRQLREFLGKAGFCRLFIPGFAEMAAPLYPLTKPGTLFNWGPDQQKAYQEIKQALLTAPALGLPDLTKPFELFVDEKQGYAKGVLTQKLGPWRRPVAYLSKKLDPVAAGWPPCLRMVAAIAVLTKDAGKLTMGQPLVILAPHAVEALVKQPPDRWLSNARMTHYQALLLDTDRVQFGPVVALNPATLLPLPEEGLQHNCLDILAEAHGTRPDLTDQPLPDADHTWYTDGSSLLQEGQRKAGAAVTTETEVIWAKALPAGTSAQRAELIALTQALKMAEGKKLNVYTDSRYAFATAHIHGEIYRRRGWLTSEGKEIKNKDEILALLKALFLPKRLSIIHCPGHQKGHSAEARGNRMADQAARKAAITETPDTSTLLAGKRTADGSEFEKRTADGSEFESPKKKAKVE

SEQ ID NO: 3111 - protein, 2094 aa, synthetic construct; identical to SEQ ID NO: 2800
  source 1..2094: note = Description of Artificial Sequence: Synthetic polypeptide

SEQ ID NO: 3112 - protein, 2096 aa, synthetic construct; identical to SEQ ID NO: 2792
  source 1..2096: note = Description of Artificial Sequence: Synthetic polypeptide

SEQ ID NO: 3113 - protein, 2091 aa, synthetic construct
  source 1..2091: note = Description of Artificial Sequence: Synthetic polypeptide
MPAAKRVKLDGGDKKYSIGLDIGTNSVGWAVITDEYKVPSKKFKVLGNTDRHSIKKNLIGALLFDSGETAEATRLKRTARRRYTRRKNRICYLQEIFSNEMAKVDDSFFHRLEESFLVEEDKKHERHPIFGNIVDEVAYHEKYPTIYHLRKKLVDSTDKADLRLIYLALAHMIKFRGHFLIEGDLNPDNSDVDKLFIQLVQTYNQLFEENPINASGVDAKAILSARLSKSRRLENLIAQLPGEKKNGLFGNLIALSLGLTPNFKSNFDLAEDAKLQLSKDTYDDDLDNLLAQIGDQYADLFLAAKNLSDAILLSDILRVNTEITKAPLSASMIKRYDEHHQDLTLLKALVRQQLPEKYKEIFFDQSKNGYAGYIDGGASQEEFYKFIKPILEKMDGTEELLVKLNREDLLRKQRTFDNGSIPHQIHLGELHAILRRQEDFYPFLKDNREKIEKILTFRIPYYVGPLARGNSRFAWMTRKSEETITPWNFEEVVDKGASAQSFIERMTNFDKNLPNEKVLPKHSLLYEYFTVYNELTKVKYVTEGMRKPAFLSGEQKKAIVDLLFKTNRKVTVKQLKEDYFKKIECFDSVEISGVEDRFNASLGTYHDLLKIIKDKDFLDNEENEDILEDIVLTLTLFEDREMIEERLKTYAHLFDDKVMKQLKRRRYTGWGRLSRKLINGIRDKQSGKTILDFLKSDGFANRNFMQLIHDDSLTFKEDIQKAQVSGQGDSLHEHIANLAGSPAIKKGILQTVKVVDELVKVMGRHKPENIVIEMARENQTTQKGQKNSRERMKRIEEGIKELGSQILKEHPVENTQLQNEKLYLYYLQNGRDMYVDQELDINRLSDYDVDHIVPQSFLKDDSIDNKVLTRSDKARGKSDNVPSEEVVKKMKNYWRQLLNAKLITQRKFDNLTKAERGGLSELDKAGFIKRQLVETRQITKHVAQILDSRMNTKYDENDKLIREVKVITLKSKLVSDFRKDFQFYKVREINNYHHAHDAYLNAVVGTALIKKYPKLESEFVYGDYKVYDVRKMIAKSEQEIGKATAKYFFYSNIMNFFKTEITLANGEIRKRPLIETNGETGEIVWDKGRDFATVRKVLSMPQVNIVKKTEVQTGGFSKESILPKRNSDKLIARKKDWDPKKYGGFDSPTVAYSVLVVAKVEKGKSKKLKSVKELLGITIMERSSFEKNPIDFLEAKGYKEVKKDLIIKLPKYSLFELENGRKRMLASAGELQKGNELALPSKYVNFLYLASHYEKLKGSPEDNEQKQLFVEQHKHYLDEIIEQISEFSKRVILADANLDKVLSAYNKHRDKPIREQAENIIHLFTLTNLGAPAAFKYFDTTIDRKRYTSTKEVLDATLIHQSITGLYETRIDLSQLGGDGGGGSGSSGGTLNIEDEHRLHETSKEPDVSLGSTWLSDFPQAWAETGGMGLAVRQAPLIIPLKATSTPVSIKQYPMSQEARLGIKPHIQRLLDQGILVPCQSPWNTPLLPVKKPGTNDYRPVQDLREVNKRVEDIHPTVPNPYNLLSGLPPSHQWYTVLDLKDAFFCLRLHPTSQPLFAFEWRDPEMGISGQLTWTRLPQGFKNSPTLFNEALHRDLADFRIQHPDLILLQYVDDLLLAATSELDCQQGTRALLQTLGNLGYRASAKKAQICQKQVKYLGYLLKEGQRWLTEARKETVMGQPTPKTPRQLREFLGKAGFCRLFIPGFAEMAAPLYPLTKPGTLFNWGPDQQKAYQEIKQALLTAPALGLPDLTKPFELFVDEKQGYAKGVLTQKLGPWRRPVAYLSKKLDPVAAGWPPCLRMVAAIAVLTKDAGKLTMGQPLVILAPHAVEALVKQPPDRWLSNARMTHYQALLLDTDRVQFGPVVALNPATLLPLPEEGLQHNCLDILAEAHGTRPDLTDQPLPDADHTWYTDGSSLLQEGQRKAGAAVTTETEVIWAKALPAGTSAQRAELIALTQALKMAEGKKLNVYTDSRYAFATAHIHGEIYRRRGWLTSEGKEIKNKDEILALLKALFLPKRLSIIHCPGHQKGHSAEARGNRMADQAARKAAITETPDTSTLLAGKRTADGSEFEKRTADGSEFESPKKKAKVE

SEQ ID NO: 3114 - protein, 2090 aa, synthetic construct; identical to SEQ ID NO: 2834
  source 1..2090: note = Description of Artificial Sequence: Synthetic polypeptide

SEQ ID NO: 3115 - protein, 2096 aa, synthetic construct
  source 1..2096: note = Description of Artificial Sequence: Synthetic polypeptide
MPAAKRVKLDGGDKKYSIGLDIGTNSVGWAVITDEYKVPSKKFKVLGNTDRHSIKKNLIGALLFDSGETAEATRLKRTARRRYTRRKNRICYLQEIFSNEMAKVDDSFFHRLEESFLVEEDKKHERHPIFGNIVDEVAYHEKYPTIYHLRKKLVDSTDKADLRLIYLALAHMIKFRGHFLIEGDLNPDNSDVDKLFIQLVQTYNQLFEENPINASGVDAKAILSARLSKSRRLENLIAQLPGEKKNGLFGNLIALSLGLTPNFKSNFDLAEDAKLQLSKDTYDDDLDNLLAQIGDQYADLFLAAKNLSDAILLSDILRVNTEITKAPLSASMIKRYDEHHQDLTLLKALVRQQLPEKYKEIFFDQSKNGYAGYIDGGASQEEFYKFIKPILEKMDGTEELLVKLNREDLLRKQRTFDNGSIPHQIHLGELHAILRRQEDFYPFLKDNREKIEKILTFRIPYYVGPLARGNSRFAWMTRKSEETITPWNFEEVVDKGASAQSFIERMTNFDKNLPNEKVLPKHSLLYEYFTVYNELTKVKYVTEGMRKPAFLSGEQKKAIVDLLFKTNRKVTVKQLKEDYFKKIECFDSVEISGVEDRFNASLGTYHDLLKIIKDKDFLDNEENEDILEDIVLTLTLFEDREMIEERLKTYAHLFDDKVMKQLKRRRYTGWGRLSRKLINGIRDKQSGKTILDFLKSDGFANRNFMQLIHDDSLTFKEDIQKAQVSGQGDSLHEHIANLAGSPAIKKGILQTVKVVDELVKVMGRHKPENIVIEMARENQTTQKGQKNSRERMKRIEEGIKELGSQILKEHPVENTQLQNEKLYLYYLQNGRDMYVDQELDINRLSDYDVDHIVPQSFLKDDSIDNKVLTRSDKARGKSDNVPSEEVVKKMKNYWRQLLNAKLITQRKFDNLTKAERGGLSELDKAGFIKRQLVETRQITKHVAQILDSRMNTKYDENDKLIREVKVITLKSKLVSDFRKDFQFYKVREINNYHHAHDAYLNAVVGTALIKKYPKLESEFVYGDYKVYDVRKMIAKSEQEIGKATAKYFFYSNIMNFFKTEITLANGEIRKRPLIETNGETGEIVWDKGRDFATVRKVLSMPQVNIVKKTEVQTGGFSKESILPKRNSDKLIARKKDWDPKKYGGFDSPTVAYSVLVVAKVEKGKSKKLKSVKELLGITIMERSSFEKNPIDFLEAKGYKEVKKDLIIKLPKYSLFELENGRKRMLASAGELQKGNELALPSKYVNFLYLASHYEKLKGSPEDNEQKQLFVEQHKHYLDEIIEQISEFSKRVILADANLDKVLSAYNKHRDKPIREQAENIIHLFTLTNLGAPAAFKYFDTTIDRKRYTSTKEVLDATLIHQSITGLYETRIDLSQLGGDGGGGGGGSEAAAKGGTLNIEDEHRLHETSKEPDVSLGSTWLSDFPQAWAETGGMGLAVRQAPLIIPLKATSTPVSIKQYPMSQEARLGIKPHIQRLLDQGILVPCQSPWNTPLLPVKKPGTNDYRPVQDLREVNKRVEDIHPTVPNPYNLLSGLPPSHQWYTVLDLKDAFFCLRLHPTSQPLFAFEWRDPEMGISGQLTWTRLPQGFKNSPTLFNEALHRDLADFRIQHPDLILLQYVDDLLLAATSELDCQQGTRALLQTLGNLGYRASAKKAQICQKQVKYLGYLLKEGQRWLTEARKETVMGQPTPKTPRQLREFLGKAGFCRLFIPGFAEMAAPLYPLTKPGTLFNWGPDQQKAYQEIKQALLTAPALGLPDLTKPFELFVDEKQGYAKGVLTQKLGPWRRPVAYLSKKLDPVAAGWPPCLRMVAAIAVLTKDAGKLTMGQPLVILAPHAVEALVKQPPDRWLSNARMTHYQALLLDTDRVQFGPVVALNPATLLPLPEEGLQHNCLDILAEAHGTRPDLTDQPLPDADHTWYTDGSSLLQEGQRKAGAAVTTETEVIWAKALPAGTSAQRAELIALTQALKMAEGKKLNVYTDSRYAFATAHIHGEIYRRRGWLTSEGKEIKNKDEILALLKALFLPKRLSIIHCPGHQKGHSAEARGNRMADQAARKAAITETPDTSTLLAGKRTADGSEFEKRTADGSEFESPKKKAKVE

SEQ ID NO: 3116 - protein, 2096 aa, synthetic construct; identical to SEQ ID NO: 2789
  source 1..2096: note = Description of Artificial Sequence: Synthetic polypeptide

SEQ ID NO: 3117 - protein, 2094 aa, synthetic construct; identical to SEQ ID NO: 2848
  source 1..2094: note = Description of Artificial Sequence: Synthetic polypeptide

SEQ ID NO: 3118 - protein, 2096 aa, synthetic construct; identical to SEQ ID NO: 2805
  source 1..2096: note = Description of Artificial Sequence: Synthetic polypeptide

SEQ ID NO: 3119 - protein, 2091 aa, synthetic construct; identical to SEQ ID NO: 2861
  source 1..2091: note = Description of Artificial Sequence: Synthetic polypeptide

SEQ ID NO: 3120 - protein, 2115 aa, synthetic construct; identical to SEQ ID NO: 2813
  source 1..2115: note = Description of Artificial Sequence: Synthetic polypeptide

SEQ ID NO: 3121 - protein, 2094 aa, synthetic construct
  source 1..2094: note = Description of Artificial Sequence: Synthetic polypeptide
MPAAKRVKLDGGDKKYSIGLDIGTNSVGWAVITDEYKVPSKKFKVLGNTDRHSIKKNLIGALLFDSGETAEATRLKRTARRRYTRRKNRICYLQEIFSNEMAKVDDSFFHRLEESFLVEEDKKHERHPIFGNIVDEVAYHEKYPTIYHLRKKLVDSTDKADLRLIYLALAHMIKFRGHFLIEGDLNPDNSDVDKLFIQLVQTYNQLFEENPINASGVDAKAILSARLSKSRRLENLIAQLPGEKKNGLFGNLIALSLGLTPNFKSNFDLAEDAKLQLSKDTYDDDLDNLLAQIGDQYADLFLAAKNLSDAILLSDILRVNTEITKAPLSASMIKRYDEHHQDLTLLKALVRQQLPEKYKEIFFDQSKNGYAGYIDGGASQEEFYKFIKPILEKMDGTEELLVKLNREDLLRKQRTFDNGSIPHQIHLGELHAILRRQEDFYPFLKDNREKIEKILTFRIPYYVGPLARGNSRFAWMTRKSEETITPWNFEEVVDKGASAQSFIERMTNFDKNLPNEKVLPKHSLLYEYFTVYNELTKVKYVTEGMRKPAFLSGEQKKAIVDLLFKTNRKVTVKQLKEDYFKKIECFDSVEISGVEDRFNASLGTYHDLLKIIKDKDFLDNEENEDILEDIVLTLTLFEDREMIEERLKTYAHLFDDKVMKQLKRRRYTGWGRLSRKLINGIRDKQSGKTILDFLKSDGFANRNFMQLIHDDSLTFKEDIQKAQVSGQGDSLHEHIANLAGSPAIKKGILQTVKVVDELVKVMGRHKPENIVIEMARENQTTQKGQKNSRERMKRIEEGIKELGSQILKEHPVENTQLQNEKLYLYYLQNGRDMYVDQELDINRLSDYDVDHIVPQSFLKDDSIDNKVLTRSDKARGKSDNVPSEEVVKKMKNYWRQLLNAKLITQRKFDNLTKAERGGLSELDKAGFIKRQLVETRQITKHVAQILDSRMNTKYDENDKLIREVKVITLKSKLVSDFRKDFQFYKVREINNYHHAHDAYLNAVVGTALIKKYPKLESEFVYGDYKVYDVRKMIAKSEQEIGKATAKYFFYSNIMNFFKTEITLANGEIRKRPLIETNGETGEIVWDKGRDFATVRKVLSMPQVNIVKKTEVQTGGFSKESILPKRNSDKLIARKKDWDPKKYGGFDSPTVAYSVLVVAKVEKGKSKKLKSVKELLGITIMERSSFEKNPIDFLEAKGYKEVKKDLIIKLPKYSLFELENGRKRMLASAGELQKGNELALPSKYVNFLYLASHYEKLKGSPEDNEQKQLFVEQHKHYLDEIIEQISEFSKRVILADANLDKVLSAYNKHRDKPIREQAENIIHLFTLTNLGAPAAFKYFDTTIDRKRYTSTKEVLDATLIHQSITGLYETRIDLSQLGGDGGGGSGGGGSSGGTLNIEDEHRLHETSKEPDVSLGSTWLSDFPQAWAETGGMGLAVRQAPLIIPLKATSTPVSIKQYPMSQEARLGIKPHIQRLLDQGILVPCQSPWNTPLLPVKKPGTNDYRPVQDLREVNKRVEDIHPTVPNPYNLLSGLPPSHQWYTVLDLKDAFFCLRLHPTSQPLFAFEWRDPEMGISGQLTWTRLPQGFKNSPTLFNEALHRDLADFRIQHPDLILLQYVDDLLLAATSELDCQQGTRALLQTLGNLGYRASAKKAQICQKQVKYLGYLLKEGQRWLTEARKETVMGQPTPKTPRQLREFLGKAGFCRLFIPGFAEMAAPLYPLTKPGTLFNWGPDQQKAYQEIKQALLTAPALGLPDLTKPFELFVDEKQGYAKGVLTQKLGPWRRPVAYLSKKLDPVAAGWPPCLRMVAAIAVLTKDAGKLTMGQPLVILAPHAVEALVKQPPDRWLSNARMTHYQALLLDTDRVQFGPVVALNPATLLPLPEEGLQHNCLDILAEAHGTRPDLTDQPLPDADHTWYTDGSSLLQEGQRKAGAAVTTETEVIWAKALPAGTSAQRAELIALTQALKMAEGKKLNVYTDSRYAFATAHIHGEIYRRRGWLTSEGKEIKNKDEILALLKALFLPKRLSIIHCPGHQKGHSAEARGNRMADQAARKAAITETPDTSTLLAGKRTADGSEFEKRTADGSEFESPKKKAKVE

SEQ ID NO: 3122 - protein, 2094 aa, synthetic construct
  source 1..2094: note = Description of Artificial Sequence: Synthetic polypeptide
MPAAKRVKLDGGDKKYSIGLDIGTNSVGWAVITDEYKVPSKKFKVLGNTDRHSIKKNLIGALLFDSGETAEATRLKRTARRRYTRRKNRICYLQEIFSNEMAKVDDSFFHRLEESFLVEEDKKHERHPIFGNIVDEVAYHEKYPTIYHLRKKLVDSTDKADLRLIYLALAHMIKFRGHFLIEGDLNPDNSDVDKLFIQLVQTYNQLFEENPINASGVDAKAILSARLSKSRRLENLIAQLPGEKKNGLFGNLIALSLGLTPNFKSNFDLAEDAKLQLSKDTYDDDLDNLLAQIGDQYADLFLAAKNLSDAILLSDILRVNTEITKAPLSASMIKRYDEHHQDLTLLKALVRQQLPEKYKEIFFDQSKNGYAGYIDGGASQEEFYKFIKPILEKMDGTEELLVKLNREDLLRKQRTFDNGSIPHQIHLGELHAILRRQEDFYPFLKDNREKIEKILTFRIPYYVGPLARGNSRFAWMTRKSEETITPWNFEEVVDKGASAQSFIERMTNFDKNLPNEKVLPKHSLLYEYFTVYNELTKVKYVTEGMRKPAFLSGEQKKAIVDLLFKTNRKVTVKQLKEDYFKKIECFDSVEISGVEDRFNASLGTYHDLLKIIKDKDFLDNEENEDILEDIVLTLTLFEDREMIEERLKTYAHLFDDKVMKQLKRRRYTGWGRLSRKLINGIRDKQSGKTILDFLKSDGFANRNFMQLIHDDSLTFKEDIQKAQVSGQGDSLHEHIANLAGSPAIKKGILQTVKVVDELVKVMGRHKPENIVIEMARENQTTQKGQKNSRERMKRIEEGIKELGSQILKEHPVENTQLQNEKLYLYYLQNGRDMYVDQELDINRLSDYDVDHIVPQSFLKDDSIDNKVLTRSDKARGKSDNVPSEEVVKKMKNYWRQLLNAKLITQRKFDNLTKAERGGLSELDKAGFIKRQLVETRQITKHVAQILDSRMNTKYDENDKLIREVKVITLKSKLVSDFRKDFQFYKVREINNYHHAHDAYLNAVVGTALIKKYPKLESEFVYGDYKVYDVRKMIAKSEQEIGKATAKYFFYSNIMNFFKTEITLANGEIRKRPLIETNGETGEIVWDKGRDFATVRKVLSMPQVNIVKKTEVQTGGFSKESILPKRNSDKLIARKKDWDPKKYGGFDSPTVAYSVLVVAKVEKGKSKKLKSVKELLGITIMERSSFEKNPIDFLEAKGYKEVKKDLIIKLPKYSLFELENGRKRMLASAGELQKGNELALPSKYVNFLYLASHYEKLKGSPEDNEQKQLFVEQHKHYLDEIIEQISEFSKRVILADANLDKVLSAYNKHRDKPIREQAENIIHLFTLTNLGAPAAFKYFDTTIDRKRYTSTKEVLDATLIHQSITGLYETRIDLSQLGGDGGGGSGSSPAPGGTLNIEDEHRLHETSKEPDVSLGSTWLSDFPQAWAETGGMGLAVRQAPLIIPLKATSTPVSIKQYPMSQEARLGIKPHIQRLLDQGILVPCQSPWNTPLLPVKKPGTNDYRPVQDLREVNKRVEDIHPTVPNPYNLLSGLPPSHQWYTVLDLKDAFFCLRLHPTSQPLFAFEWRDPEMGISGQLTWTRLPQGFKNSPTLFNEALHRDLADFRIQHPDLILLQYVDDLLLAATSELDCQQGTRALLQTLGNLGYRASAKKAQICQKQVKYLGYLLKEGQRWLTEARKETVMGQPTPKTPRQLREFLGKAGFCRLFIPGFAEMAAPLYPLTKPGTLFNWGPDQQKAYQEIKQALLTAPALGLPDLTKPFELFVDEKQGYAKGVLTQKLGPWRRPVAYLSKKLDPVAAGWPPCLRMVAAIAVLTKDAGKLTMGQPLVILAPHAVEALVKQPPDRWLSNARMTHYQALLLDTDRVQFGPVVALNPATLLPLPEEGLQHNCLDILAEAHGTRPDLTDQPLPDADHTWYTDGSSLLQEGQRKAGAAVTTETEVIWAKALPAGTSAQRAELIALTQALKMAEGKKLNVYTDSRYAFATAHIHGEIYRRRGWLTSEGKEIKNKDEILALLKALFLPKRLSIIHCPGHQKGHSAEARGNRMADQAARKAAITETPDTSTLLAGKRTADGSEFEKRTADGSEFESPKKKAKVE

SEQ ID NO: 3123 - protein, 2090 aa, synthetic construct; identical to SEQ ID NO: 2823
  source 1..2090: note = Description of Artificial Sequence: Synthetic polypeptide

SEQ ID NO: 3124 - protein, 2094 aa, synthetic construct; identical to SEQ ID NO: 2833
  source 1..2094: note = Description of Artificial Sequence: Synthetic polypeptide

SEQ ID NO: 3125 - protein, 2096 aa, synthetic construct; identical to SEQ ID NO: 2794
  source 1..2096: note = Description of Artificial Sequence: Synthetic polypeptide

SEQ ID NO: 3126 - protein, 2100 aa, synthetic construct; identical to SEQ ID NO: 2802
  source 1..2100: note = Description of Artificial Sequence: Synthetic polypeptide

SEQ ID NO: 3127 - protein, 2096 aa, synthetic construct; identical to SEQ ID NO: 2839
  source 1..2096: note = Description of Artificial Sequence: Synthetic polypeptide

SEQ ID NO: 3128 - protein, 2094 aa, synthetic construct; identical to SEQ ID NO: 2841
  source 1..2094: note = Description of Artificial Sequence: Synthetic polypeptide

SEQ ID NO: 3129 - protein, 2096 aa, synthetic construct
  source 1..2096: note = Description of Artificial Sequence: Synthetic polypeptide
MPAAKRVKLDGGDKKYSIGLDIGTNSVGWAVITDEYKVPSKKFKVLGNTDRHSIKKNLIGALLFDSGETAEATRLKRTARRRYTRRKNRICYLQEIFSNEMAKVDDSFFHRLEESFLVEEDKKHERHPIFGNIVDEVAYHEKYPTIYHLRKKLVDSTDKADLRLIYLALAHMIKFRGHFLIEGDLNPDNSDVDKLFIQLVQTYNQLFEENPINASGVDAKAILSARLSKSRRLENLIAQLPGEKKNGLFGNLIALSLGLTPNFKSNFDLAEDAKLQLSKDTYDDDLDNLLAQIGDQYADLFLAAKNLSDAILLSDILRVNTEITKAPLSASMIKRYDEHHQDLTLLKALVRQQLPEKYKEIFFDQSKNGYAGYIDGGASQEEFYKFIKPILEKMDGTEELLVKLNREDLLRKQRTFDNGSIPHQIHLGELHAILRRQEDFYPFLKDNREKIEKILTFRIPYYVGPLARGNSRFAWMTRKSEETITPWNFEEVVDKGASAQSFIERMTNFDKNLPNEKVLPKHSLLYEYFTVYNELTKVKYVTEGMRKPAFLSGEQKKAIVDLLFKTNRKVTVKQLKEDYFKKIECFDSVEISGVEDRFNASLGTYHDLLKIIKDKDFLDNEENEDILEDIVLTLTLFEDREMIEERLKTYAHLFDDKVMKQLKRRRYTGWGRLSRKLINGIRDKQSGKTILDFLKSDGFANRNFMQLIHDDSLTFKEDIQKAQVSGQGDSLHEHIANLAGSPAIKKGILQTVKVVDELVKVMGRHKPENIVIEMARENQTTQKGQKNSRERMKRIEEGIKELGSQILKEHPVENTQLQNEKLYLYYLQNGRDMYVDQELDINRLSDYDVDHIVPQSFLKDDSIDNKVLTRSDKARGKSDNVPSEEVVKKMKNYWRQLLNAKLITQRKFDNLTKAERGGLSELDKAGFIKRQLVETRQITKHVAQILDSRMNTKYDENDKLIREVKVITLKSKLVSDFRKDFQFYKVREINNYHHAHDAYLNAVVGTALIKKYPKLESEFVYGDYKVYDVRKMIAKSEQEIGKATAKYFFYSNIMNFFKTEITLANGEIRKRPLIETNGETGEIVWDKGRDFATVRKVLSMPQVNIVKKTEVQTGGFSKESILPKRNSDKLIARKKDWDPKKYGGFDSPTVAYSVLVVAKVEKGKSKKLKSVKELLGITIMERSSFEKNPIDFLEAKGYKEVKKDLIIKLPKYSLFELENGRKRMLASAGELQKGNELALPSKYVNFLYLASHYEKLKGSPEDNEQKQLFVEQHKHYLDEIIEQISEFSKRVILADANLDKVLSAYNKHRDKPIREQAENIIHLFTLTNLGAPAAFKYFDTTIDRKRYTSTKEVLDATLIHQSITGLYETRIDLSQLGGDGGGGSGGGEAAAKGGTLNIEDEHRLHETSKEPDVSLGSTWLSDFPQAWAETGGMGLAVRQAPLIIPLKATSTPVSIKQYPMSQEARLGIKPHIQRLLDQGILVPCQSPWNTPLLPVKKPGTNDYRPVQDLREVNKRVEDIHPTVPNPYNLLSGLPPSHQWYTVLDLKDAFFCLRLHPTSQPLFAFEWRDPEMGISGQLTWTRLPQGFKNSPTLFNEALHRDLADFRIQHPDLILLQYVDDLLLAATSELDCQQGTRALLQTLGNLGYRASAKKAQICQKQVKYLGYLLKEGQRWLTEARKETVMGQPTPKTPRQLREFLGKAGFCRLFIPGFAEMAAPLYPLTKPGTLFNWGPDQQKAYQEIKQALLTAPALGLPDLTKPFELFVDEKQGYAKGVLTQKLGPWRRPVAYLSKKLDPVAAGWPPCLRMVAAIAVLTKDAGKLTMGQPLVILAPHAVEALVKQPPDRWLSNARMTHYQALLLDTDRVQFGPVVALNPATLLPLPEEGLQHNCLDILAEAHGTRPDLTDQPLPDADHTWYTDGSSLLQEGQRKAGAAVTTETEVIWAKALPAGTSAQRAELIALTQALKMAEGKKLNVYTDSRYAFATAHIHGEIYRRRGWLTSEGKEIKNKDEILALLKALFLPKRLSIIHCPGHQKGHSAEARGNRMADQAARKAAITETPDTSTLLAGKRTADGSEFEKRTADGSEFESPKKKAKVE

SEQ ID NO: 3130 - protein, 2094 aa, synthetic construct; identical to SEQ ID NO: 2801
  source 1..2094: note = Description of Artificial Sequence: Synthetic polypeptide

SEQ ID NO: 3131 - protein, 2096 aa, synthetic construct
  source 1..2096: note = Description of Artificial Sequence: Synthetic polypeptide
MPAAKRVKLDGGDKKYSIGLDIGTNSVGWAVITDEYKVPSKKFKVLGNTDRHSIKKNLIGALLFDSGETAEATRLKRTARRRYTRRKNRICYLQEIFSNEMAKVDDSFFHRLEESFLVEEDKKHERHPIFGNIVDEVAYHEKYPTIYHLRKKLVDSTDKADLRLIYLALAHMIKFRGHFLIEGDLNPDNSDVDKLFIQLVQTYNQLFEENPINASGVDAKAILSARLSKSRRLENLIAQLPGEKKNGLFGNLIALSLGLTPNFKSNFDLAEDAKLQLSKDTYDDDLDNLLAQIGDQYADLFLAAKNLSDAILLSDILRVNTEITKAPLSASMIKRYDEHHQDLTLLKALVRQQLPEKYKEIFFDQSKNGYAGYIDGGASQEEFYKFIKPILEKMDGTEELLVKLNREDLLRKQRTFDNGSIPHQIHLGELHAILRRQEDFYPFLKDNREKIEKILTFRIPYYVGPLARGNSRFAWMTRKSEETITPWNFEEVVDKGASAQSFIERMTNFDKNLPNEKVLPKHSLLYEYFTVYNELTKVKYVTEGMRKPAFLSGEQKKAIVDLLFKTNRKVTVKQLKEDYFKKIECFDSVEISGVEDRFNASLGTYHDLLKIIKDKDFLDNEENEDILEDIVLTLTLFEDREMIEERLKTYAHLFDDKVMKQLKRRRYTGWGRLSRKLINGIRDKQSGKTILDFLKSDGFANRNFMQLIHDDSLTFKEDIQKAQVSGQGDSLHEHIANLAGSPAIKKGILQTVKVVDELVKVMGRHKPENIVIEMARENQTTQKGQKNSRERMKRIEEGIKELGSQILKEHPVENTQLQNEKLYLYYLQNGRDMYVDQELDINRLSDYDVDHIVPQSFLKDDSIDNKVLTRSDKARGKSDNVPSEEVVKKMKNYWRQLLNAKLITQRKFDNLTKAERGGLSELDKAGFIKRQLVETRQITKHVAQILDSRMNTKYDENDKLIREVKVITLKSKLVSDFRKDFQFYKVREINNYHHAHDAYLNAVVGTALIKKYPKLESEFVYGDYKVYDVRKMIAKSEQEIGKATAKYFFYSNIMNFFKTEITLANGEIRKRPLIETNGETGEIVWDKGRDFATVRKVLSMPQVNIVKKTEVQTGGFSKESILPKRNSDKLIARKKDWDPKKYGGFDSPTVAYSVLVVAKVEKGKSKKLKSVKELLGITIMERSSFEKNPIDFLEAKGYKEVKKDLIIKLPKYSLFELENGRKRMLASAGELQKGNELALPSKYVNFLYLASHYEKLKGSPEDNEQKQLFVEQHKHYLDEIIEQISEFSKRVILADANLDKVLSAYNKHRDKPIREQAENIIHLFTLTNLGAPAAFKYFDTTIDRKRYTSTKEVLDATLIHQSITGLYETRIDLSQLGGDGGGSSEAAAKGGSGGTLNIEDEHRLHETSKEPDVSLGSTWLSDFPQAWAETGGMGLAVRQAPLIIPLKATSTPVSIKQYPMSQEARLGIKPHIQRLLDQGILVPCQSPWNTPLLPVKKPGTNDYRPVQDLREVNKRVEDIHPTVPNPYNLLSGLPPSHQWYTVLDLKDAFFCLRLHPTSQPLFAFEWRDPEMGISGQLTWTRLPQGFKNSPTLFNEALHRDLADFRIQHPDLILLQYVDDLLLAATSELDCQQGTRALLQTLGNLGYRASAKKAQICQKQVKYLGYLLKEGQRWLTEARKETVMGQPTPKTPRQLREFLGKAGFCRLFIPGFAEMAAPLYPLTKPGTLFNWGPDQQKAYQEIKQALLTAPALGLPDLTKPFELFVDEKQGYAKGVLTQKLGPWRRPVAYLSKKLDPVAAGWPPCLRMVAAIAVLTKDAGKLTMGQPLVILAPHAVEALVKQPPDRWLSNARMTHYQALLLDTDRVQFGPVVALNPATLLPLPEEGLQHNCLDILAEAHGTRPDLTDQPLPDADHTWYTDGSSLLQEGQRKAGAAVTTETEVIWAKALPAGTSAQRAELIALTQALKMAEGKKLNVYTDSRYAFATAHIHGEIYRRRGWLTSEGKEIKNKDEILALLKALFLPKRLSIIHCPGHQKGHSAEARGNRMADQAARKAAITETPDTSTLLAGKRTADGSEFEKRTADGSEFESPKKKAKVE

SEQ ID NO: 3132 - protein, 2118 aa, synthetic construct
  source 1..2118: note = Description of Artificial Sequence: Synthetic polypeptide
MPAAKRVKLDGGDKKYSIGLDIGTNSVGWAVITDEYKVPSKKFKVLGNTDRHSIKKNLIGALLFDSGETAEATRLKRTARRRYTRRKNRICYLQEIFSNEMAKVDDSFFHRLEESFLVEEDKKHERHPIFGNIVDEVAYHEKYPTIYHLRKKLVDSTDKADLRLIYLALAHMIKFRGHFLIEGDLNPDNSDVDKLFIQLVQTYNQLFEENPINASGVDAKAILSARLSKSRRLENLIAQLPGEKKNGLFGNLIALSLGLTPNFKSNFDLAEDAKLQLSKDTYDDDLDNLLAQIGDQYADLFLAAKNLSDAILLSDILRVNTEITKAPLSASMIKRYDEHHQDLTLLKALVRQQLPEKYKEIFFDQSKNGYAGYIDGGASQEEFYKFIKPILEKMDGTEELLVKLNREDLLRKQRTFDNGSIPHQIHLGELHAILRRQEDFYPFLKDNREKIEKILTFRIPYYVGPLARGNSRFAWMTRKSEETITPWNFEEVVDKGASAQSFIERMTNFDKNLPNEKVLPKHSLLYEYFTVYNELTKVKYVTEGMRKPAFLSGEQKKAIVDLLFKTNRKVTVKQLKEDYFKKIECFDSVEISGVEDRFNASLGTYHDLLKIIKDKDFLDNEENEDILEDIVLTLTLFEDREMIEERLKTYAHLFDDKVMKQLKRRRYTGWGRLSRKLINGIRDKQSGKTILDFLKSDGFANRNFMQLIHDDSLTFKEDIQKAQVSGQGDSLHEHIANLAGSPAIKKGILQTVKVVDELVKVMGRHKPENIVIEMARENQTTQKGQKNSRERMKRIEEGIKELGSQILKEHPVENTQLQNEKLYLYYLQNGRDMYVDQELDINRLSDYDVDHIVPQSFLKDDSIDNKVLTRSDKARGKSDNVPSEEVVKKMKNYWRQLLNAKLITQRKFDNLTKAERGGLSELDKAGFIKRQLVETRQITKHVAQILDSRMNTKYDENDKLIREVKVITLKSKLVSDFRKDFQFYKVREINNYHHAHDAYLNAVVGTALIKKYPKLESEFVYGDYKVYDVRKMIAKSEQEIGKATAKYFFYSNIMNFFKTEITLANGEIRKRPLIETNGETGEIVWDKGRDFATVRKVLSMPQVNIVKKTEVQTGGFSKESILPKRNSDKLIARKKDWDPKKYGGFDSPTVAYSVLVVAKVEKGKSKKLKSVKELLGITIMERSSFEKNPIDFLEAKGYKEVKKDLIIKLPKYSLFELENGRKRMLASAGELQKGNELALPSKYVNFLYLASHYEKLKGSPEDNEQKQLFVEQHKHYLDEIIEQISEFSKRVILADANLDKVLSAYNKHRDKPIREQAENIIHLFTLTNLGAPAAFKYFDTTIDRKRYTSTKEVLDATLIHQSITGLYETRIDLSQLGGDGGSGGSSGGSSGSETPGTSESATPESSGGSSGGSSGGTLNIEDEHRLHETSKEPDVSLGSTWLSDFPQAWAETGGMGLAVRQAPLIIPLKATSTPVSIKQYPMSQEARLGIKPHIQRLLDQGILVPCQSPWNTPLLPVKKPGTNDYRPVQDLREVNKRVEDIHPTVPNPYNLLSGLPPSHQWYTVLDLKDAFFCLRLHPTSQPLFAFEWRDPEMGISGQLTWTRLPQGFKNSPTLFNEALHRDLADFRIQHPDLILLQYVDDLLLAATSELDCQQGTRALLQTLGNLGYRASAKKAQICQKQVKYLGYLLKEGQRWLTEARKETVMGQPTPKTPRQLREFLGKAGFCRLFIPGFAEMAAPLYPLTKPGTLFNWGPDQQKAYQEIKQALLTAPALGLPDLTKPFELFVDEKQGYAKGVLTQKLGPWRRPVAYLSKKLDPVAAGWPPCLRMVAAIAVLTKDAGKLTMGQPLVILAPHAVEALVKQPPDRWLSNARMTHYQALLLDTDRVQFGPVVALNPATLLPLPEEGLQHNCLDILAEAHGTRPDLTDQPLPDADHTWYTDGSSLLQEGQRKAGAAVTTETEVIWAKALPAGTSAQRAELIALTQALKMAEGKKLNVYTDSRYAFATAHIHGEIYRRRGWLTSEGKEIKNKDEILALLKALFLPKRLSIIHCPGHQKGHSAEARGNRMADQAARKAAITETPDTSTLLAGKRTADGSEFEKRTADGSEFESPKKKAKVE

SEQ ID NO: 3133 - protein, 2094 aa, synthetic construct; identical to SEQ ID NO: 2859
  source 1..2094: note = Description of Artificial Sequence: Synthetic polypeptide

SEQ ID NO: 3134 - protein, 2094 aa, synthetic construct; identical to SEQ ID NO: 2854
  source 1..2094: note = Description of Artificial Sequence: Synthetic polypeptide

SEQ ID NO: 3135 - protein, 2091 aa, synthetic construct; identical to SEQ ID NO: 2832
  source 1..2091: note = Description of Artificial Sequence: Synthetic polypeptide

SEQ ID NO: 3136 - protein, 2096 aa, synthetic construct
  source 1..2096: note = Description of Artificial Sequence: Synthetic polypeptide
MPAAKRVKLDGGDKKYSIGLDIGTNSVGWAVITDEYKVPSKKFKVLGNTDRHSIKKNLIGALLFDSGETAEATRLKRTARRRYTRRKNRICYLQEIFSNEMAKVDDSFFHRLEESFLVEEDKKHERHPIFGNIVDEVAYHEKYPTIYHLRKKLVDSTDKADLRLIYLALAHMIKFRGHFLIEGDLNPDNSDVDKLFIQLVQTYNQLFEENPINASGVDAKAILSARLSKSRRLENLIAQLPGEKKNGLFGNLIALSLGLTPNFKSNFDLAEDAKLQLSKDTYDDDLDNLLAQIGDQYADLFLAAKNLSDAILLSDILRVNTEITKAPLSASMIKRYDEHHQDLTLLKALVRQQLPEKYKEIFFDQSKNGYAGYIDGGASQEEFYKFIKPILEKMDGTEELLVKLNREDLLRKQRTFDNGSIPHQIHLGELHAILRRQEDFYPFLKDNREKIEKILTFRIPYYVGPLARGNSRFAWMTRKSEETITPWNFEEVVDKGASAQSFIERMTNFDKNLPNEKVLPKHSLLYEYFTVYNELTKVKYVTEGMRKPAFLSGEQKKAIVDLLFKTNRKVTVKQLKEDYFKKIECFDSVEISGVEDRFNASLGTYHDLLKIIKDKDFLDNEENEDILEDIVLTLTLFEDREMIEERLKTYAHLFDDKVMKQLKRRRYTGWGRLSRKLINGIRDKQSGKTILDFLKSDGFANRNFMQLIHDDSLTFKEDIQKAQVSGQGDSLHEHIANLAGSPAIKKGILQTVKVVDELVKVMGRHKPENIVIEMARENQTTQKGQKNSRERMKRIEEGIKELGSQILKEHPVENTQLQNEKLYLYYLQNGRDMYVDQELDINRLSDYDVDHIVPQSFLKDDSIDNKVLTRSDKARGKSDNVPSEEVVKKMKNYWRQLLNAKLITQRKFDNLTKAERGGLSELDKAGFIKRQLVETRQITKHVAQILDSRMNTKYDENDKLIREVKVITLKSKLVSDFRKDFQFYKVREINNYHHAHDAYLNAVVGTALIKKYPKLESEFVYGDYKVYDVRKMIAKSEQEIGKATAKYFFYSNIMNFFKTEITLANGEIRKRPLIETNGETGEIVWDKGRDFATVRKVLSMPQVNIVKKTEVQTGGFSKESILPKRNSDKLIARKKDWDPKKYGGFDSPTVAYSVLVVAKVEKGKSKKLKSVKELLGITIMERSSFEKNPIDFLEAKGYKEVKKDLIIKLPKYSLFELENGRKRMLASAGELQKGNELALPSKYVNFLYLASHYEKLKGSPEDNEQKQLFVEQHKHYLDEIIEQISEFSKRVILADANLDKVLSAYNKHRDKPIREQAENIIHLFTLTNLGAPAAFKYFDTTIDRKRYTSTKEVLDATLIHQSITGLYETRIDLSQLGGDGGGGGPAPEAAAKGGTLNIEDEHRLHETSKEPDVSLGSTWLSDFPQAWAETGGMGLAVRQAPLIIPLKATSTPVSIKQYPMSQEARLGIKPHIQRLLDQGILVPCQSPWNTPLLPVKKPGTNDYRPVQDLREVNKRVEDIHPTVPNPYNLLSGLPPSHQWYTVLDLKDAFFCLRLHPTSQPLFAFEWRDPEMGISGQLTWTRLPQGFKNSPTLFNEALHRDLADFRIQHPDLILLQYVDDLLLAATSELDCQQGTRALLQTLGNLGYRASAKKAQICQKQVKYLGYLLKEGQRWLTEARKETVMGQPTPKTPRQLREFLGKAGFCRLFIPGFAEMAAPLYPLTKPGTLFNWGPDQQKAYQEIKQALLTAPALGLPDLTKPFELFVDEKQGYAKGVLTQKLGPWRRPVAYLSKKLDPVAAGWPPCLRMVAAIAVLTKDAGKLTMGQPLVILAPHAVEALVKQPPDRWLSNARMTHYQALLLDTDRVQFGPVVALNPATLLPLPEEGLQHNCLDILAEAHGTRPDLTDQPLPDADHTWYTDGSSLLQEGQRKAGAAVTTETEVIWAKALPAGTSAQRAELIALTQALKMAEGKKLNVYTDSRYAFATAHIHGEIYRRRGWLTSEGKEIKNKDEILALLKALFLPKRLSIIHCPGHQKGHSAEARGNRMADQAARKAAITETPDTSTLLAGKRTADGSEFEKRTADGSEFESPKKKAKVE

SEQ ID NO: 3137 - protein, 2091 aa, synthetic construct
  source 1..2091: note = Description of Artificial Sequence: Synthetic polypeptide
MPAAKRVKLDGGDKKYSIGLDIGTNSVGWAVITDEYKVPSKKFKVLGNTDRHSIKKNLIGALLFDSGETAEATRLKRTARRRYTRRKNRICYLQEIFSNEMAKVDDSFFHRLEESFLVEEDKKHERHPIFGNIVDEVAYHEKYPTIYHLRKKLVDSTDKADLRLIYLALAHMIKFRGHFLIEGDLNPDNSDVDKLFIQLVQTYNQLFEENPINASGVDAKAILSARLSKSRRLENLIAQLPGEKKNGLFGNLIALSLGLTPNFKSNFDLAEDAKLQLSKDTYDDDLDNLLAQIGDQYADLFLAAKNLSDAILLSDILRVNTEITKAPLSASMIKRYDEHHQDLTLLKALVRQQLPEKYKEIFFDQSKNGYAGYIDGGASQEEFYKFIKPILEKMDGTEELLVKLNREDLLRKQRTFDNGSIPHQIHLGELHAILRRQEDFYPFLKDNREKIEKILTFRIPYYVGPLARGNSRFAWMTRKSEETITPWNFEEVVDKGASAQSFIERMTNFDKNLPNEKVLPKHSLLYEYFTVYNELTKVKYVTEGMRKPAFLSGEQKKAIVDLLFKTNRKVTVKQLKEDYFKKIECFDSVEISGVEDRFNASLGTYHDLLKIIKDKDFLDNEENEDILEDIVLTLTLFEDREMIEERLKTYAHLFDDKVMKQLKRRRYTGWGRLSRKLINGIRDKQSGKTILDFLKSDGFANRNFMQLIHDDSLTFKEDIQKAQVSGQGDSLHEHIANLAGSPAIKKGILQTVKVVDELVKVMGRHKPENIVIEMARENQTTQKGQKNSRERMKRIEEGIKELGSQILKEHPVENTQLQNEKLYLYYLQNGRDMYVDQELDINRLSDYDVDHIVPQSFLKDDSIDNKVLTRSDKARGKSDNVPSEEVVKKMKNYWRQLLNAKLITQRKFDNLTKAERGGLSELDKAGFIKRQLVETRQITKHVAQILDSRMNTKYDENDKLIREVKVITLKSKLVSDFRKDFQFYKVREINNYHHAHDAYLNAVVGTALIKKYPKLESEFVYGDYKVYDVRKMIAKSEQEIGKATAKYFFYSNIMNFFKTEITLANGEIRKRPLIETNGETGEIVWDKGRDFATVRKVLSMPQVNIVKKTEVQTGGFSKESILPKRNSDKLIARKKDWDPKKYGGFDSPTVAYSVLVVAKVEKGKSKKLKSVKELLGITIMERSSFEKNPIDFLEAKGYKEVKKDLIIKLPKYSLFELENGRKRMLASAGELQKGNELALPSKYVNFLYLASHYEKLKGSPEDNEQKQLFVEQHKHYLDEIIEQISEFSKRVILADANLDKVLSAYNKHRDKPIREQAENIIHLFTLTNLGAPAAFKYFDTTIDRKRYTSTKEVLDATLIHQSITGLYETRIDLSQLGGDGGPAPGGGGGTLNIEDEYRLHEISTEPDVSPGSTWLSDFPQAWAETGGMGLAVRQAPLIIPLKATSTPVSIKQYPMSQEAKLGIKPHIQRLLDQGILVPCQSPWNTPLLPVKKPGTNDYRPVQGLREVNKRVEDIHPTVPNPYNLLSGLPTSHRWYTVLDLKDAFFCLRLHPTSQPLFASEWRDPGMGISGQLTWTRLPQGFKNSPTLFDEALHRGLADFRIQHPDLILLQYVDDLLLAATSELDCQQGTRALLKTLGNLGYRASAKKAQICQKQVKYLGYLLREGQRWLTEARKETVMGQPTPKTPRQLREFLGTAGFCRLWIPRFAEMAAPLYPLTKTGTLFNWGPDQQKAYHEIKQALLTAPALGLPDLTKPFELFVDEKQGYAKGVLTQKLGPWRRPVAYLSKKLDPVAAGWPPCLRMVAAIAVLTKDAGKLTMGQPLVILAPHAVEALVKQPPDRWLSNARMTHYQAMLLDTDRVQFGPVVALNPATLLPLPEEGAPHDCLEILAETHGTEPDLTDQPIPDADHTWYTDGSSFLQEGQRKAGAAVTTETEVIWARALPAGTSAQRAELIALTQALKMAEGKRLNVYTDSRYAFATAHIHGEIYKRRGLLTSEGREIKNKSEILALLKALFLPKRLSIIHCLGHQKGDSAEARGNRLADQAAREAAIKTPPDTSTLLAGKRTADGSEFEKRTADGSEFESPKKKAKVE

SEQ ID NO: 3138 - protein, 2088 aa, synthetic construct
  source 1..2088: note = Description of Artificial Sequence: Synthetic polypeptide
MPAAKRVKLDGGDKKYSIGLDIGTNSVGWAVITDEYKVPSKKFKVLGNTDRHSIKKNLIGALLFDSGETAEATRLKRTARRRYTRRKNRICYLQEIFSNEMAKVDDSFFHRLEESFLVEEDKKHERHPIFGNIVDEVAYHEKYPTIYHLRKKLVDSTDKADLRLIYLALAHMIKFRGHFLIEGDLNPDNSDVDKLFIQLVQTYNQLFEENPINASGVDAKAILSARLSKSRRLENLIAQLPGEKKNGLFGNLIALSLGLTPNFKSNFDLAEDAKLQLSKDTYDDDLDNLLAQIGDQYADLFLAAKNLSDAILLSDILRVNTEITKAPLSASMIKRYDEHHQDLTLLKALVRQQLPEKYKEIFFDQSKNGYAGYIDGGASQEEFYKFIKPILEKMDGTEELLVKLNREDLLRKQRTFDNGSIPHQIHLGELHAILRRQEDFYPFLKDNREKIEKILTFRIPYYVGPLARGNSRFAWMTRKSEETITPWNFEEVVDKGASAQSFIERMTNFDKNLPNEKVLPKHSLLYEYFTVYNELTKVKYVTEGMRKPAFLSGEQKKAIVDLLFKTNRKVTVKQLKEDYFKKIECFDSVEISGVEDRFNASLGTYHDLLKIIKDKDFLDNEENEDILEDIVLTLTLFEDREMIEERLKTYAHLFDDKVMKQLKRRRYTGWGRLSRKLINGIRDKQSGKTILDFLKSDGFANRNFMQLIHDDSLTFKEDIQKAQVSGQGDSLHEHIANLAGSPAIKKGILQTVKVVDELVKVMGRHKPENIVIEMARENQTTQKGQKNSRERMKRIEEGIKELGSQILKEHPVENTQLQNEKLYLYYLQNGRDMYVDQELDINRLSDYDVDHIVPQSFLKDDSIDNKVLTRSDKARGKSDNVPSEEVVKKMKNYWRQLLNAKLITQRKFDNLTKAERGGLSELDKAGFIKRQLVETRQITKHVAQILDSRMNTKYDENDKLIREVKVITLKSKLVSDFRKDFQFYKVREINNYHHAHDAYLNAVVGTALIKKYPKLESEFVYGDYKVYDVRKMIAKSEQEIGKATAKYFFYSNIMNFFKTEITLANGEIRKRPLIETNGETGEIVWDKGRDFATVRKVLSMPQVNIVKKTEVQTGGFSKESILPKRNSDKLIARKKDWDPKKYGGFDSPTVAYSVLVVAKVEKGKSKKLKSVKELLGITIMERSSFEKNPIDFLEAKGYKEVKKDLIIKLPKYSLFELENGRKRMLASAGELQKGNELALPSKYVNFLYLASHYEKLKGSPEDNEQKQLFVEQHKHYLDEIIEQISEFSKRVILADANLDKVLSAYNKHRDKPIREQAENIIHLFTLTNLGAPAAFKYFDTTIDRKRYTSTKEVLDATLIHQSITGLYETRIDLSQLGGDGGGGSGGTLNIEDEYRLHEISTEPDVSPGSTWLSDFPQAWAETGGMGLAVRQAPLIIPLKATSTPVSIKQYPMSQEAKLGIKPHIQRLLDQGILVPCQSPWNTPLLPVKKPGTNDYRPVQGLREVNKRVEDIHPTVPNPYNLLSGLPTSHRWYTVLDLKDAFFCLRLHPTSQPLFASEWRDPGMGISGQLTWTRLPQGFKNSPTLFNEALHRGLADFRIQHPDLILLQYVDDLLLAATSELDCQQGTRALLKTLGNLGYRASAKKAQICQKQVKYLGYLLREGQRWLTEARKETVMGQPTPKTPRQLREFLGTAGFCRLWIPRFAEMAAPLYPLTKPGTLFNWGPDQQKAYHEIKQALLTAPALGLPDLTKPFELFVDEKQGYAKGVLTQKLGPWRRPVAYLSKKLDPVAAGWPPCLRMVAAIAVLTKDAGKLTMGQPLVILAPHAVEALVKQPPDRWLSNARMTHYQAMLLDTDRVQFGPVVALNPATLLPLPEEGAPHDCLEILAETHGTEPDLTDQPIPDADHTWYTDGSSFLQEGQRKAGAAVTTETEVIWARALPAGTSAQRAELIALTQALKMAEGKRLNVYTDSRYAFATAHIHGEIYKRRGWLTSEGREIKNKSEILALLKALFLPKRLSIIHCLGHQKGDSAEARGNRLADQAAREAAIKTPPDTSTLLAGKRTADGSEFEKRTADGSEFESPKKKAKVE

SEQ ID NO: 3139 - protein, 2091 aa, synthetic construct
  source 1..2091: note = Description of Artificial Sequence: Synthetic polypeptide
MPAAKRVKLDGGDKKYSIGLDIGTNSVGWAVITDEYKVPSKKFKVLGNTDRHSIKKNLIGALLFDSGETAEATRLKRTARRRYTRRKNRICYLQEIFSNEMAKVDDSFFHRLEESFLVEEDKKHERHPIFGNIVDEVAYHEKYPTIYHLRKKLVDSTDKADLRLIYLALAHMIKFRGHFLIEGDLNPDNSDVDKLFIQLVQTYNQLFEENPINASGVDAKAILSARLSKSRRLENLIAQLPGEKKNGLFGNLIALSLGLTPNFKSNFDLAEDAKLQLSKDTYDDDLDNLLAQIGDQYADLFLAAKNLSDAILLSDILRVNTEITKAPLSASMIKRYDEHHQDLTLLKALVRQQLPEKYKEIFFDQSKNGYAGYIDGGASQEEFYKFIKPILEKMDGTEELLVKLNREDLLRKQRTFDNGSIPHQIHLGELHAILRRQEDFYPFLKDNREKIEKILTFRIPYYVGPLARGNSRFAWMTRKSEETITPWNFEEVVDKGASAQSFIERMTNFDKNLPNEKVLPKHSLLYEYFTVYNELTKVKYVTEGMRKPAFLSGEQKKAIVDLLFKTNRKVTVKQLKEDYFKKIECFDSVEISGVEDRFNASLGTYHDLLKIIKDKDFLDNEENEDILEDIVLTLTLFEDREMIEERLKTYAHLFDDKVMKQLKRRRYTGWGRLSRKLINGIRDKQSGKTILDFLKSDGFANRNFMQLIHDDSLTFKEDIQKAQVSGQGDSLHEHIANLAGSPAIKKGILQTVKVVDELVKVMGRHKPENIVIEMARENQTTQKGQKNSRERMKRIEEGIKELGSQILKEHPVENTQLQNEKLYLYYLQNGRDMYVDQELDINRLSDYDVDHIVPQSFLKDDSIDNKVLTRSDKARGKSDNVPSEEVVKKMKNYWRQLLNAKLITQRKFDNLTKAERGGLSELDKAGFIKRQLVETRQITKHVAQILDSRMNTKYDENDKLIREVKVITLKSKLVSDFRKDFQFYKVREINNYHHAHDAYLNAVVGTALIKKYPKLESEFVYGDYKVYDVRKMIAKSEQEIGKATAKYFFYSNIMNFFKTEITLANGEIRKRPLIETNGETGEIVWDKGRDFATVRKVLSMPQVNIVKKTEVQTGGFSKESILPKRNSDKLIARKKDWDPKKYGGFDSPTVAYSVLVVAKVEKGKSKKLKSVKELLGITIMERSSFEKNPIDFLEAKGYKEVKKDLIIKLPKYSLFELENGRKRMLASAGELQKGNELALPSKYVNFLYLASHYEKLKGSPEDNEQKQLFVEQHKHYLDEIIEQISEFSKRVILADANLDKVLSAYNKHRDKPIREQAENIIHLFTLTNLGAPAAFKYFDTTIDRKRYTSTKEVLDATLIHQSITGLYETRIDLSQLGGDGGPAPGGSGGTLNIEDEYRLHEISTEPDVSPGSTWLSDFPQAWAETGGMGLAVRQAPLIIPLKATSTPVSIKQYPMSQEAKLGIKPHIQRLLDQGILVPCQSPWNTPLLPVKKPGTNDYRPVQGLREVNKRVEDIHPTVPNPYNLLSGLPTSHRWYTVLDLKDAFFCLRLHPTSQPLFASEWRDPGMGISGQLTWTRLPQGFKNSPTLFNEALHRGLADFRIQHPDLILLQYVDDLLLAATSELDCQQGTRALLKTLGNLGYRASAKKAQICQKQVKYLGYLLREGQRWLTEARKETVMGQPTPKTPRQLREFLGTAGFCRLWIPRFAEMAAPLYPLTKPGTLFNWGPDQQKAYHEIKQALLTAPALGLPDLTKPFELFVDEKQGYAKGVLTQKLGPWRRPVAYLSKKLDPVAAGWPPCLRMVAAIAVLTKDAGKLTMGQPLVILAPHAVEALVKQPPDRWLSNARMTHYQAMLLDTDRVQFGPVVALNPATLLPLPEEGAPHDCLEILAETHGTEPDLTDQPIPDADHTWYTDGSSFLQEGQRKAGAAVTTETEVIWARALPAGTSAQRAELIALTQALKMAEGKRLNVYTDSRYAFATAHIHGEIYKRRGWLTSEGREIKNKSEILALLKALFLPKRLSIIHCLGHQKGDSAEARGNRLADQAAREAAIKTPPDTSTLLAGKRTADGSEFEKRTADGSEFESPKKKAKVE

SEQ ID NO: 3140 - protein, 2105 aa, synthetic construct
  source 1..2105: note = Description of Artificial Sequence: Synthetic polypeptide
MPAAKRVKLDGGDKKYSIGLDIGTNSVGWAVITDEYKVPSKKFKVLGNTDRHSIKKNLIGALLFDSGETAEATRLKRTARRRYTRRKNRICYLQEIFSNEMAKVDDSFFHRLEESFLVEEDKKHERHPIFGNIVDEVAYHEKYPTIYHLRKKLVDSTDKADLRLIYLALAHMIKFRGHFLIEGDLNPDNSDVDKLFIQLVQTYNQLFEENPINASGVDAKAILSARLSKSRRLENLIAQLPGEKKNGLFGNLIALSLGLTPNFKSNFDLAEDAKLQLSKDTYDDDLDNLLAQIGDQYADLFLAAKNLSDAILLSDILRVNTEITKAPLSASMIKRYDEHHQDLTLLKALVRQQLPEKYKEIFFDQSKNGYAGYIDGGASQEEFYKFIKPILEKMDGTEELLVKLNREDLLRKQRTFDNGSIPHQIHLGELHAILRRQEDFYPFLKDNREKIEKILTFRIPYYVGPLARGNSRFAWMTRKSEETITPWNFEEVVDKGASAQSFIERMTNFDKNLPNEKVLPKHSLLYEYFTVYNELTKVKYVTEGMRKPAFLSGEQKKAIVDLLFKTNRKVTVKQLKEDYFKKIECFDSVEISGVEDRFNASLGTYHDLLKIIKDKDFLDNEENEDILEDIVLTLTLFEDREMIEERLKTYAHLFDDKVMKQLKRRRYTGWGRLSRKLINGIRDKQSGKTILDFLKSDGFANRNFMQLIHDDSLTFKEDIQKAQVSGQGDSLHEHIANLAGSPAIKKGILQTVKVVDELVKVMGRHKPENIVIEMARENQTTQKGQKNSRERMKRIEEGIKELGSQILKEHPVENTQLQNEKLYLYYLQNGRDMYVDQELDINRLSDYDVDHIVPQSFLKDDSIDNKVLTRSDKARGKSDNVPSEEVVKKMKNYWRQLLNAKLITQRKFDNLTKAERGGLSELDKAGFIKRQLVETRQITKHVAQILDSRMNTKYDENDKLIREVKVITLKSKLVSDFRKDFQFYKVREINNYHHAHDAYLNAVVGTALIKKYPKLESEFVYGDYKVYDVRKMIAKSEQEIGKATAKYFFYSNIMNFFKTEITLANGEIRKRPLIETNGETGEIVWDKGRDFATVRKVLSMPQVNIVKKTEVQTGGFSKESILPKRNSDKLIARKKDWDPKKYGGFDSPTVAYSVLVVAKVEKGKSKKLKSVKELLGITIMERSSFEKNPIDFLEAKGYKEVKKDLIIKLPKYSLFELENGRKRMLASAGELQKGNELALPSKYVNFLYLASHYEKLKGSPEDNEQKQLFVEQHKHYLDEIIEQISEFSKRVILADANLDKVLSAYNKHRDKPIREQAENIIHLFTLTNLGAPAAFKYFDTTIDRKRYTSTKEVLDATLIHQSITGLYETRIDLSQLGGDGGEAAAKEAAAKEAAAKEAAAKGGTLNIEDEYRLHEISTEPDVSPGSTWLSDFPQAWAETGGMGLAVRQAPLIIPLKATSTPVSIKQYPMSQEAKLGIKPHIQRLLDQGILVPCQSPWNTPLLPVKKPGTNDYRPVQGLREVNKRVEDIHPTVPNPYNLLSGLPTSHRWYTVLDLKDAFFCLRLHPTSQPLFASEWRDPGMGISGQLTWTRLPQGFKNSPTLFNEALHRGLADFRIQHPDLILLQYVDDLLLAATSELDCQQGTRALLKTLGNLGYRASAKKAQICQKQVKYLGYLLREGQRWLTEARKETVMGQPTPKTPRQLREFLGTAGFCRLWIPRFAEMAAPLYPLTKPGTLFNWGPDQQKAYHEIKQALLTAPALGLPDLTKPFELFVDEKQGYAKGVLTQKLGPWRRPVAYLSKKLDPVAAGWPPCLRMVAAIAVLTKDAGKLTMGQPLVILAPHAVEALVKQPPDRWLSNARMTHYQAMLLDTDRVQFGPVVALNPATLLPLPEEGAPHDCLEILAETHGTEPDLTDQPIPDADHTWYTDGSSFLQEGQRKAGAAVTTETEVIWARALPAGTSAQRAELIALTQALKMAEGKRLNVYTDSRYAFATAHIHGEIYKRRGWLTSEGREIKNKSEILALLKALFLPKRLSIIHCLGHQKGDSAEARGNRLADQAAREAAIKTPPDTSTLLAGKRTADGSEFEKRTADGSEFESPKKKAKVE

SEQ ID NO: 3141 - protein, 2151 aa, synthetic construct
  source 1..2151: note = Description of Artificial Sequence: Synthetic polypeptide
MPAAKRVKLDGGDKKYSIGLDIGTNSVGWAVITDEYKVPSKKFKVLGNTDRHSIKKNLIGALLFDSGETAEATRLKRTARRRYTRRKNRICYLQEIFSNEMAKVDDSFFHRLEESFLVEEDKKHERHPIFGNIVDEVAYHEKYPTIYHLRKKLVDSTDKADLRLIYLALAHMIKFRGHFLIEGDLNPDNSDVDKLFIQLVQTYNQLFEENPINASGVDAKAILSARLSKSRRLENLIAQLPGEKKNGLFGNLIALSLGLTPNFKSNFDLAEDAKLQLSKDTYDDDLDNLLAQIGDQYADLFLAAKNLSDAILLSDILRVNTEITKAPLSASMIKRYDEHHQDLTLLKALVRQQLPEKYKEIFFDQSKNGYAGYIDGGASQEEFYKFIKPILEKMDGTEELLVKLNREDLLRKQRTFDNGSIPHQIHLGELHAILRRQEDFYPFLKDNREKIEKILTFRIPYYVGPLARGNSRFAWMTRKSEETITPWNFEEVVDKGASAQSFIERMTNFDKNLPNEKVLPKHSLLYEYFTVYNELTKVKYVTEGMRKPAFLSGEQKKAIVDLLFKTNRKVTVKQLKEDYFKKIECFDSVEISGVEDRFNASLGTYHDLLKIIKDKDFLDNEENEDILEDIVLTLTLFEDREMIEERLKTYAHLFDDKVMKQLKRRRYTGWGRLSRKLINGIRDKQSGKTILDFLKSDGFANRNFMQLIHDDSLTFKEDIQKAQVSGQGDSLHEHIANLAGSPAIKKGILQTVKVVDELVKVMGRHKPENIVIEMARENQTTQKGQKNSRERMKRIEEGIKELGSQILKEHPVENTQLQNEKLYLYYLQNGRDMYVDQELDINRLSDYDVDHIVPQSFLKDDSIDNKVLTRSDKARGKSDNVPSEEVVKKMKNYWRQLLNAKLITQRKFDNLTKAERGGLSELDKAGFIKRQLVETRQITKHVAQILDSRMNTKYDENDKLIREVKVITLKSKLVSDFRKDFQFYKVREINNYHHAHDAYLNAVVGTALIKKYPKLESEFVYGDYKVYDVRKMIAKSEQEIGKATAKYFFYSNIMNFFKTEITLANGEIRKRPLIETNGETGEIVWDKGRDFATVRKVLSMPQVNIVKKTEVQTGGFSKESILPKRNSDKLIARKKDWDPKKYGGFDSPTVAYSVLVVAKVEKGKSKKLKSVKELLGITIMERSSFEKNPIDFLEAKGYKEVKKDLIIKLPKYSLFELENGRKRMLASAGELQKGNELALPSKYVNFLYLASHYEKLKGSPEDNEQKQLFVEQHKHYLDEIIEQISEFSKRVILADANLDKVLSAYNKHRDKPIREQAENIIHLFTLTNLGAPAAFKYFDTTIDRKRYTSTKEVLDATLIHQSITGLYETRIDLSQLGGDGGAEAAAKEAAAKEAAAKEAAAKALEAEAAAKEAAAKEAAAKEAAAKAGGVQEISDSRPMLHIYLNGRRFLGLLDTGADKTCIAGRDWPANWPIHQTESSLQGLGMACGVARSSQPLRWQHEDKSGIIHPFVIPTLPFTLWGRDIMKDIKVRLMTDSPDDSQDLMIGAIESNLFADQISWKSDQPVWLNQWPLKQEKLQALQQLVTEQLQLGHLEESNSPWNTPVFVIKKKSGKWRLLQDLRAVNATMHDMGALQPGLPSPVAVPKGWEIIIIDLQDCFFNIKLHPEDCKRFAFSVPSPNFKRPYQRFQWKVLPQGMKNSPTLCQKFVDKAILTVRDKYQDSYIVHYMDDILLAHPSRSIVDEILTSMIQALNKHGLVVSTEKIQKYDNLKYLGTHIQGDSVSYQKLQIRTDKLRTLNDFQKLLGNINWIRPFLKLTTGELKPLFEILNGDSNPISTRKLTPEACKALQLMNERLSTARVKRLDLSQPWSLCILKTEYTPTACLWQDGVVEWIHLPHISPKVITPYDIFCTQLIIKGRHRSKELFSKDPDYIVVPYTKVQFDLLLQEKEDWPISLLGFLGEVHFHLPKDPLLTFTLQTAIIFPHMTSTTPLEKGIVIFTDGSANGRSVTYIQGREPIIKENTQNTAQQAEIVAVITAFEEVSQPFNLYTDSKYVTGLFPEIETATLSPRTKIYTELKHLQRLIHKRQEKFYIGHIRGHTGLPGPLAQGNAYADSLTRILTAAGKRTADGSEFEKRTADGSEFESPKKKAKVE

SEQ ID NO: 3142 - protein, 2130 aa, synthetic construct
  source 1..2130: note = Description of Artificial Sequence: Synthetic polypeptide
MPAAKRVKLDGGDKKYSIGLDIGTNSVGWAVITDEYKVPSKKFKVLGNTDRHSIKKNLIGALLFDSGETAEATRLKRTARRRYTRRKNRICYLQEIFSNEMAKVDDSFFHRLEESFLVEEDKKHERHPIFGNIVDEVAYHEKYPTIYHLRKKLVDSTDKADLRLIYLALAHMIKFRGHFLIEGDLNPDNSDVDKLFIQLVQTYNQLFEENPINASGVDAKAILSARLSKSRRLENLIAQLPGEKKNGLFGNLIALSLGLTPNFKSNFDLAEDAKLQLSKDTYDDDLDNLLAQIGDQYADLFLAAKNLSDAILLSDILRVNTEITKAPLSASMIKRYDEHHQDLTLLKALVRQQLPEKYKEIFFDQSKNGYAGYIDGGASQEEFYKFIKPILEKMDGTEELLVKLNREDLLRKQRTFDNGSIPHQIHLGELHAILRRQEDFYPFLKDNREKIEKILTFRIPYYVGPLARGNSRFAWMTRKSEETITPWNFEEVVDKGASAQSFIERMTNFDKNLPNEKVLPKHSLLYEYFTVYNELTKVKYVTEGMRKPAFLSGEQKKAIVDLLFKTNRKVTVKQLKEDYFKKIECFDSVEISGVEDRFNASLGTYHDLLKIIKDKDFLDNEENEDILEDIVLTLTLFEDREMIEERLKTYAHLFDDKVMKQLKRRRYTGWGRLSRKLINGIRDKQSGKTILDFLKSDGFANRNFMQLIHDDSLTFKEDIQKAQVSGQGDSLHEHIANLAGSPAIKKGILQTVKVVDELVKVMGRHKPENIVIEMARENQTTQKGQKNSRERMKRIEEGIKELGSQILKEHPVENTQLQNEKLYLYYLQNGRDMYVDQELDINRLSDYDVDHIVPQSFLKDDSIDNKVLTRSDKARGKSDNVPSEEVVKKMKNYWRQLLNAKLITQRKFDNLTKAERGGLSELDKAGFIKRQLVETRQITKHVAQILDSRMNTKYDENDKLIREVKVITLKSKLVSDFRKDFQFYKVREINNYHHAHDAYLNAVVGTALIKKYPKLESEFVYGDYKVYDVRKMIAKSEQEIGKATAKYFFYSNIMNFFKTEITLANGEIRKRPLIETNGETGEIVWDKGRDFATVRKVLSMPQVNIVKKTEVQTGGFSKESILPKRNSDKLIARKKDWDPKKYGGFDSPTVAYSVLVVAKVEKGKSKKLKSVKELLGITIMERSSFEKNPIDFLEAKGYKEVKKDLIIKLPKYSLFELENGRKRMLASAGELQKGNELALPSKYVNFLYLASHYEKLKGSPEDNEQKQLFVEQHKHYLDEIIEQISEFSKRVILADANLDKVLSAYNKHRDKPIREQAENIIHLFTLTNLGAPAAFKYFDTTIDRKRYTSTKEVLDATLIHQSITGLYETRIDLSQLGGDGGEAAAKEAAAKEAAAKEAAAKEAAAKGGVQEISDSRPMLHIYLNGRRFLGLLDTGADKTCIAGRDWPANWPIHQTESSLQGLGMACGVARSSQPLRWQHEDKSGIIHPFVIPTLPFTLWGRDIMKDIKVRLMTDSPDDSQDLMIGAIESNLFADQISWKSDQPVWLNQWPLKQEKLQALQQLVTEQLQLGHLEESNSPWNTPVFVIKKKSGKWRLLQDLRAVNATMHDMGALQPGLPSPVAVPKGWEIIIIDLQDCFFNIKLHPEDCKRFAFSVPSPNFKRPYQRFQWKVLPQGMKNSPTLCQKFVDKAILTVRDKYQDSYIVHYMDDILLAHPSRSIVDEILTSMIQALNKHGLVVSTEKIQKYDNLKYLGTHIQGDSVSYQKLQIRTDKLRTLNDFQKLLGNINWIRPFLKLTTGELKPLFEILNGDSNPISTRKLTPEACKALQLMNERLSTARVKRLDLSQPWSLCILKTEYTPTACLWQDGVVEWIHLPHISPKVITPYDIFCTQLIIKGRHRSKELFSKDPDYIVVPYTKVQFDLLLQEKEDWPISLLGFLGEVHFHLPKDPLLTFTLQTAIIFPHMTSTTPLEKGIVIFTDGSANGRSVTYIQGREPIIKENTQNTAQQAEIVAVITAFEEVSQPFNLYTDSKYVTGLFPEIETATLSPRTKIYTELKHLQRLIHKRQEKFYIGHIRGHTGLPGPLAQGNAYADSLTRILTAAGKRTADGSEFEKRTADGSEFESPKKKAKVE

SEQ ID NO: 3143 - protein, 2138 aa, synthetic construct
  source 1..2138: note = Description of Artificial Sequence: Synthetic polypeptide
MPAAKRVKLDGGDKKYSIGLDIGTNSVGWAVITDEYKVPSKKFKVLGNTDRHSIKKNLIGALLFDSGETAEATRLKRTARRRYTRRKNRICYLQEIFSNEMAKVDDSFFHRLEESFLVEEDKKHERHPIFGNIVDEVAYHEKYPTIYHLRKKLVDSTDKADLRLIYLALAHMIKFRGHFLIEGDLNPDNSDVDKLFIQLVQTYNQLFEENPINASGVDAKAILSARLSKSRRLENLIAQLPGEKKNGLFGNLIALSLGLTPNFKSNFDLAEDAKLQLSKDTYDDDLDNLLAQIGDQYADLFLAAKNLSDAILLSDILRVNTEITKAPLSASMIKRYDEHHQDLTLLKALVRQQLPEKYKEIFFDQSKNGYAGYIDGGASQEEFYKFIKPILEKMDGTEELLVKLNREDLLRKQRTFDNGSIPHQIHLGELHAILRRQEDFYPFLKDNREKIEKILTFRIPYYVGPLARGNSRFAWMTRKSEETITPWNFEEVVDKGASAQSFIERMTNFDKNLPNEKVLPKHSLLYEYFTVYNELTKVKYVTEGMRKPAFLSGEQKKAIVDLLFKTNRKVTVKQLKEDYFKKIECFDSVEISGVEDRFNASLGTYHDLLKIIKDKDFLDNEENEDILEDIVLTLTLFEDREMIEERLKTYAHLFDDKVMKQLKRRRYTGWGRLSRKLINGIRDKQSGKTILDFLKSDGFANRNFMQLIHDDSLTFKEDIQKAQVSGQGDSLHEHIANLAGSPAIKKGILQTVKVVDELVKVMGRHKPENIVIEMARENQTTQKGQKNSRERMKRIEEGIKELGSQILKEHPVENTQLQNEKLYLYYLQNGRDMYVDQELDINRLSDYDVDHIVPQSFLKDDSIDNKVLTRSDKARGKSDNVPSEEVVKKMKNYWRQLLNAKLITQRKFDNLTKAERGGLSELDKAGFIKRQLVETRQITKHVAQILDSRMNTKYDENDKLIREVKVITLKSKLVSDFRKDFQFYKVREINNYHHAHDAYLNAVVGTALIKKYPKLESEFVYGDYKVYDVRKMIAKSEQEIGKATAKYFFYSNIMNFFKTEITLANGEIRKRPLIETNGETGEIVWDKGRDFATVRKVLSMPQVNIVKKTEVQTGGFSKESILPKRNSDKLIARKKDWDPKKYGGFDSPTVAYSVLVVAKVEKGKSKKLKSVKELLGITIMERSSFEKNPIDFLEAKGYKEVKKDLIIKLPKYSLFELENGRKRMLASAGELQKGNELALPSKYVNFLYLASHYEKLKGSPEDNEQKQLFVEQHKHYLDEIIEQISEFSKRVILADANLDKVLSAYNKHRDKPIREQAENIIHLFTLTNLGAPAAFKYFDTTIDRKRYTSTKEVLDATLIHQSITGLYETRIDLSQLGGDGGSGGSSGGSSGSETPGTSESATPESSGGSSGGSSGGVQEISDSRPMLHIYLNGRRFLGLLDTGADKTCIAGRDWPANWPIHQTESSLQGLGMACGVARSSQPLRWQHEDKSGIIHPFVIPTLPFTLWGRDIMKDIKVRLMTDSPDDSQDLMIGAIESNLFADQISWKSDQPVWLNQWPLKQEKLQALQQLVTEQLQLGHLEESNSPWNTPVFVIKKKSGKWRLLQDLRAVNATMHDMGALQPGLPSPVAVPKGWEIIIIDLQDCFFNIKLHPEDCKRFAFSVPSPNFKRPYQRFQWKVLPQGMKNSPTLCQKFVDKAILTVRDKYQDSYIVHYMDDILLAHPSRSIVDEILTSMIQALNKHGLVVSTEKIQKYDNLKYLGTHIQGDSVSYQKLQIRTDKLRTLNDFQKLLGNINWIRPFLKLTTGELKPLFEILNGDSNPISTRKLTPEACKALQLMNERLSTARVKRLDLSQPWSLCILKTEYTPTACLWQDGVVEWIHLPHISPKVITPYDIFCTQLIIKGRHRSKELFSKDPDYIVVPYTKVQFDLLLQEKEDWPISLLGFLGEVHFHLPKDPLLTFTLQTAIIFPHMTSTTPLEKGIVIFTDGSANGRSVTYIQGREPIIKENTQNTAQQAEIVAVITAFEEVSQPFNLYTDSKYVTGLFPEIETATLSPRTKIYTELKHLQRLIHKRQEKFYIGHIRGHTGLPGPLAQGNAYADSLTRILTAAGKRTADGSEFEKRTADGSEFESPKKKAKVE

SEQ ID NO: 3144 - protein, 2116 aa, synthetic construct
  source 1..2116: note = Description of Artificial Sequence: Synthetic polypeptide
MPAAKRVKLDGGDKKYSIGLDIGTNSVGWAVITDEYKVPSKKFKVLGNTDRHSIKKNLIGALLFDSGETAEATRLKRTARRRYTRRKNRICYLQEIFSNEMAKVDDSFFHRLEESFLVEEDKKHERHPIFGNIVDEVAYHEKYPTIYHLRKKLVDSTDKADLRLIYLALAHMIKFRGHFLIEGDLNPDNSDVDKLFIQLVQTYNQLFEENPINASGVDAKAILSARLSKSRRLENLIAQLPGEKKNGLFGNLIALSLGLTPNFKSNFDLAEDAKLQLSKDTYDDDLDNLLAQIGDQYADLFLAAKNLSDAILLSDILRVNTEITKAPLSASMIKRYDEHHQDLTLLKALVRQQLPEKYKEIFFDQSKNGYAGYIDGGASQEEFYKFIKPILEKMDGTEELLVKLNREDLLRKQRTFDNGSIPHQIHLGELHAILRRQEDFYPFLKDNREKIEKILTFRIPYYVGPLARGNSRFAWMTRKSEETITPWNFEEVVDKGASAQSFIERMTNFDKNLPNEKVLPKHSLLYEYFTVYNELTKVKYVTEGMRKPAFLSGEQKKAIVDLLFKTNRKVTVKQLKEDYFKKIECFDSVEISGVEDRFNASLGTYHDLLKIIKDKDFLDNEENEDILEDIVLTLTLFEDREMIEERLKTYAHLFDDKVMKQLKRRRYTGWGRLSRKLINGIRDKQSGKTILDFLKSDGFANRNFMQLIHDDSLTFKEDIQKAQVSGQGDSLHEHIANLAGSPAIKKGILQTVKVVDELVKVMGRHKPENIVIEMARENQTTQKGQKNSRERMKRIEEGIKELGSQILKEHPVENTQLQNEKLYLYYLQNGRDMYVDQELDINRLSDYDVDHIVPQSFLKDDSIDNKVLTRSDKARGKSDNVPSEEVVKKMKNYWRQLLNAKLITQRKFDNLTKAERGGLSELDKAGFIKRQLVETRQITKHVAQILDSRMNTKYDENDKLIREVKVITLKSKLVSDFRKDFQFYKVREINNYHHAHDAYLNAVVGTALIKKYPKLESEFVYGDYKVYDVRKMIAKSEQEIGKATAKYFFYSNIMNFFKTEITLANGEIRKRPLIETNGETGEIVWDKGRDFATVRKVLSMPQVNIVKKTEVQTGGFSKESILPKRNSDKLIARKKDWDPKKYGGFDSPTVAYSVLVVAKVEKGKSKKLKSVKELLGITIMERSSFEKNPIDFLEAKGYKEVKKDLIIKLPKYSLFELENGRKRMLASAGELQKGNELALPSKYVNFLYLASHYEKLKGSPEDNEQKQLFVEQHKHYLDEIIEQISEFSKRVILADANLDKVLSAYNKHRDKPIREQAENIIHLFTLTNLGAPAAFKYFDTTIDRKRYTSTKEVLDATLIHQSITGLYETRIDLSQLGGDGGGGGEAAAKGGSGGVQEISDSRPMLHIYLNGRRFLGLLDTGADKTCIAGRDWPANWPIHQTESSLQGLGMACGVARSSQPLRWQHEDKSGIIHPFVIPTLPFTLWGRDIMKDIKVRLMTDSPDDSQDLMIGAIESNLFADQISWKSDQPVWLNQWPLKQEKLQALQQLVTEQLQLGHLEESNSPWNTPVFVIKKKSGKWRLLQDLRAVNATMHDMGALQPGLPSPVAVPKGWEIIIIDLQDCFFNIKLHPEDCKRFAFSVPSPNFKRPYQRFQWKVLPQGMKNSPTLCQKFVDKAILTVRDKYQDSYIVHYMDDILLAHPSRSIVDEILTSMIQALNKHGLVVSTEKIQKYDNLKYLGTHIQGDSVSYQKLQIRTDKLRTLNDFQKLLGNINWIRPFLKLTTGELKPLFEILNGDSNPISTRKLTPEACKALQLMNERLSTARVKRLDLSQPWSLCILKTEYTPTACLWQDGVVEWIHLPHISPKVITPYDIFCTQLIIKGRHRSKELFSKDPDYIVVPYTKVQFDLLLQEKEDWPISLLGFLGEVHFHLPKDPLLTFTLQTAIIFPHMTSTTPLEKGIVIFTDGSANGRSVTYIQGREPIIKENTQNTAQQAEIVAVITAFEEVSQPFNLYTDSKYVTGLFPEIETATLSPRTKIYTELKHLQRLIHKRQEKFYIGHIRGHTGLPGPLAQGNAYADSLTRILTAAGKRTADGSEFEKRTADGSEFESPKKKAKVE

SEQ ID NO: 3145 - protein, 2113 aa, synthetic construct
  source 1..2113: note = Description of Artificial Sequence: Synthetic polypeptide
MPAAKRVKLDGGDKKYSIGLDIGTNSVGWAVITDEYKVPSKKFKVLGNTDRHSIKKNLIGALLFDSGETAEATRLKRTARRRYTRRKNRICYLQEIFSNEMAKVDDSFFHRLEESFLVEEDKKHERHPIFGNIVDEVAYHEKYPTIYHLRKKLVDSTDKADLRLIYLALAHMIKFRGHFLIEGDLNPDNSDVDKLFIQLVQTYNQLFEENPINASGVDAKAILSARLSKSRRLENLIAQLPGEKKNGLFGNLIALSLGLTPNFKSNFDLAEDAKLQLSKDTYDDDLDNLLAQIGDQYADLFLAAKNLSDAILLSDILRVNTEITKAPLSASMIKRYDEHHQDLTLLKALVRQQLPEKYKEIFFDQSKNGYAGYIDGGASQEEFYKFIKPILEKMDGTEELLVKLNREDLLRKQRTFDNGSIPHQIHLGELHAILRRQEDFYPFLKDNREKIEKILTFRIPYYVGPLARGNSRFAWMTRKSEETITPWNFEEVVDKGASAQSFIERMTNFDKNLPNEKVLPKHSLLYEYFTVYNELTKVKYVTEGMRKPAFLSGEQKKAIVDLLFKTNRKVTVKQLKEDYFKKIECFDSVEISGVEDRFNASLGTYHDLLKIIKDKDFLDNEENEDILEDIVLTLTLFEDREMIEERLKTYAHLFDDKVMKQLKRRRYTGWGRLSRKLINGIRDKQSGKTILDFLKSDGFANRNFMQLIHDDSLTFKEDIQKAQVSGQGDSLHEHIANLAGSPAIKKGILQTVKVVDELVKVMGRHKPENIVIEMARENQTTQKGQKNSRERMKRIEEGIKELGSQILKEHPVENTQLQNEKLYLYYLQNGRDMYVDQELDINRLSDYDVDHIVPQSFLKDDSIDNKVLTRSDKARGKSDNVPSEEVVKKMKNYWRQLLNAKLITQRKFDNLTKAERGGLSELDKAGFIKRQLVETRQITKHVAQILDSRMNTKYDENDKLIREVKVITLKSKLVSDFRKDFQFYKVREINNYHHAHDAYLNAVVGTALIKKYPKLESEFVYGDYKVYDVRKMIAKSEQEIGKATAKYFFYSNIMNFFKTEITLANGEIRKRPLIETNGETGEIVWDKGRDFATVRKVLSMPQVNIVKKTEVQTGGFSKESILPKRNSDKLIARKKDWDPKKYGGFDSPTVAYSVLVVAKVEKGKSKKLKSVKELLGITIMERSSFEKNPIDFLEAKGYKEVKKDLIIKLPKYSLFELENGRKRMLASAGELQKGNELALPSKYVNFLYLASHYEKLKGSPEDNEQKQLFVEQHKHYLDEIIEQISEFSKRVILADANLDKVLSAYNKHRDKPIREQAENIIHLFTLTNLGAPAAFKYFDTTIDRKRYTSTKEVLDATLIHQSITGLYETRIDLSQLGGDGGPAPEAAAKGGVQEISDSRPMLHIYLNGRRFLGLLDTGADKTCIAGRDWPANWPIHQTESSLQGLGMACGVARSSQPLRWQHEDKSGIIHPFVIPTLPFTLWGRDIMKDIKVRLMTDSPDDSQDLMIGAIESNLFADQISWKSDQPVWLNQWPLKQEKLQALQQLVTEQLQLGHLEESNSPWNTPVFVIKKKSGKWRLLQDLRAVNATMHDMGALQPGLPSPVAVPKGWEIIIIDLQDCFFNIKLHPEDCKRFAFSVPSPNFKRPYQRFQWKVLPQGMKNSPTLCQKFVDKAILTVRDKYQDSYIVHYMDDILLAHPSRSIVDEILTSMIQALNKHGLVVSTEKIQKYDNLKYLGTHIQGDSVSYQKLQIRTDKLRTLNDFQKLLGNINWIRPFLKLTTGELKPLFEILNGDSNPISTRKLTPEACKALQLMNERLSTARVKRLDLSQPWSLCILKTEYTPTACLWQDGVVEWIHLPHISPKVITPYDIFCTQLIIKGRHRSKELFSKDPDYIVVPYTKVQFDLLLQEKEDWPISLLGFLGEVHFHLPKDPLLTFTLQTAIIFPHMTSTTPLEKGIVIFTDGSANGRSVTYIQGREPIIKENTQNTAQQAEIVAVITAFEEVSQPFNLYTDSKYVTGLFPEIETATLSPRTKIYTELKHLQRLIHKRQEKFYIGHIRGHTGLPGPLAQGNAYADSLTRILTAAGKRTADGSEFEKRTADGSEFESPKKKAKVE

SEQ ID NO: 3146 - protein, 2116 aa, synthetic construct
  source 1..2116: note = Description of Artificial Sequence: Synthetic polypeptide
MPAAKRVKLDGGDKKYSIGLDIGTNSVGWAVITDEYKVPSKKFKVLGNTDRHSIKKNLIGALLFDSGETAEATRLKRTARRRYTRRKNRICYLQEIFSNEMAKVDDSFFHRLEESFLVEEDKKHERHPIFGNIVDEVAYHEKYPTIYHLRKKLVDSTDKADLRLIYLALAHMIKFRGHFLIEGDLNPDNSDVDKLFIQLVQTYNQLFEENPINASGVDAKAILSARLSKSRRLENLIAQLPGEKKNGLFGNLIALSLGLTPNFKSNFDLAEDAKLQLSKDTYDDDLDNLLAQIGDQYADLFLAAKNLSDAILLSDILRVNTEITKAPLSASMIKRYDEHHQDLTLLKALVRQQLPEKYKEIFFDQSKNGYAGYIDGGASQEEFYKFIKPILEKMDGTEELLVKLNREDLLRKQRTFDNGSIPHQIHLGELHAILRRQEDFYPFLKDNREKIEKILTFRIPYYVGPLARGNSRFAWMTRKSEETITPWNFEEVVDKGASAQSFIERMTNFDKNLPNEKVLPKHSLLYEYFTVYNELTKVKYVTEGMRKPAFLSGEQKKAIVDLLFKTNRKVTVKQLKEDYFKKIECFDSVEISGVEDRFNASLGTYHDLLKIIKDKDFLDNEENEDILEDIVLTLTLFEDREMIEERLKTYAHLFDDKVMKQLKRRRYTGWGRLSRKLINGIRDKQSGKTILDFLKSDGFANRNFMQLIHDDSLTFKEDIQKAQVSGQGDSLHEHIANLAGSPAIKKGILQTVKVVDELVKVMGRHKPENIVIEMARENQTTQKGQKNSRERMKRIEEGIKELGSQILKEHPVENTQLQNEKLYLYYLQNGRDMYVDQELDINRLSDYDVDHIVPQSFLKDDSIDNKVLTRSDKARGKSDNVPSEEVVKKMKNYWRQLLNAKLITQRKFDNLTKAERGGLSELDKAGFIKRQLVETRQITKHVAQILDSRMNTKYDENDKLIREVKVITLKSKLVSDFRKDFQFYKVREINNYHHAHDAYLNAVVGTALIKKYPKLESEFVYGDYKVYDVRKMIAKSEQEIGKATAKYFFYSNIMNFFKTEITLANGEIRKRPLIETNGETGEIVWDKGRDFATVRKVLSMPQVNIVKKTEVQTGGFSKESILPKRNSDKLIARKKDWDPKKYGGFDSPTVAYSVLVVAKVEKGKSKKLKSVKELLGITIMERSSFEKNPIDFLEAKGYKEVKKDLIIKLPKYSLFELENGRKRMLASAGELQKGNELALPSKYVNFLYLASHYEKLKGSPEDNEQKQLFVEQHKHYLDEIIEQISEFSKRVILADANLDKVLSAYNKHRDKPIREQAENIIHLFTLTNLGAPAAFKYFDTTIDRKRYTSTKEVLDATLIHQSITGLYETRIDLSQLGGDGGPAPGGGEAAAKGGVQEISDSRPMLHIYLNGRRFLGLLDTGADKTCIAGRDWPANWPIHQTESSLQGLGMACGVARSSQPLRWQHEDKSGIIHPFVIPTLPFTLWGRDIMKDIKVRLMTDSPDDSQDLMIGAIESNLFADQISWKSDQPVWLNQWPLKQEKLQALQQLVTEQLQLGHLEESNSPWNTPVFVIKKKSGKWRLLQDLRAVNATMHDMGALQPGLPSPVAVPKGWEIIIIDLQDCFFNIKLHPEDCKRFAFSVPSPNFKRPYQRFQWKVLPQGMKNSPTLCQKFVDKAILTVRDKYQDSYIVHYMDDILLAHPSRSIVDEILTSMIQALNKHGLVVSTEKIQKYDNLKYLGTHIQGDSVSYQKLQIRTDKLRTLNDFQKLLGNINWIRPFLKLTTGELKPLFEILNGDSNPISTRKLTPEACKALQLMNERLSTARVKRLDLSQPWSLCILKTEYTPTACLWQDGVVEWIHLPHISPKVITPYDIFCTQLIIKGRHRSKELFSKDPDYIVVPYTKVQFDLLLQEKEDWPISLLGFLGEVHFHLPKDPLLTFTLQTAIIFPHMTSTTPLEKGIVIFTDGSANGRSVTYIQGREPIIKENTQNTAQQAEIVAVITAFEEVSQPFNLYTDSKYVTGLFPEIETATLSPRTKIYTELKHLQRLIHKRQEKFYIGHIRGHTGLPGPLAQGNAYADSLTRILTAAGKRTADGSEFEKRTADGSEFESPKKKAKVE

SEQ ID NO: 3147 - protein, 2116 aa, synthetic construct
  source 1..2116: note = Description of Artificial Sequence: Synthetic polypeptide
MPAAKRVKLDGGDKKYSIGLDIGTNSVGWAVITDEYKVPSKKFKVLGNTDRHSIKKNLIGALLFDSGETAEATRLKRTARRRYTRRKNRICYLQEIFSNEMAKVDDSFFHRLEESFLVEEDKKHERHPIFGNIVDEVAYHEKYPTIYHLRKKLVDSTDKADLRLIYLALAHMIKFRGHFLIEGDLNPDNSDVDKLFIQLVQTYNQLFEENPINASGVDAKAILSARLSKSRRLENLIAQLPGEKKNGLFGNLIALSLGLTPNFKSNFDLAEDAKLQLSKDTYDDDLDNLLAQIGDQYADLFLAAKNLSDAILLSDILRVNTEITKAPLSASMIKRYDEHHQDLTLLKALVRQQLPEKYKEIFFDQSKNGYAGYIDGGASQEEFYKFIKPILEKMDGTEELLVKLNREDLLRKQRTFDNGSIPHQIHLGELHAILRRQEDFYPFLKDNREKIEKILTFRIPYYVGPLARGNSRFAWMTRKSEETITPWNFEEVVDKGASAQSFIERMTNFDKNLPNEKVLPKHSLLYEYFTVYNELTKVKYVTEGMRKPAFLSGEQKKAIVDLLFKTNRKVTVKQLKEDYFKKIECFDSVEISGVEDRFNASLGTYHDLLKIIKDKDFLDNEENEDILEDIVLTLTLFEDREMIEERLKTYAHLFDDKVMKQLKRRRYTGWGRLSRKLINGIRDKQSGKTILDFLKSDGFANRNFMQLIHDDSLTFKEDIQKAQVSGQGDSLHEHIANLAGSPAIKKGILQTVKVVDELVKVMGRHKPENIVIEMARENQTTQKGQKNSRERMKRIEEGIKELGSQILKEHPVENTQLQNEKLYLYYLQNGRDMYVDQELDINRLSDYDVDHIVPQSFLKDDSIDNKVLTRSDKARGKSDNVPSEEVVKKMKNYWRQLLNAKLITQRKFDNLTKAERGGLSELDKAGFIKRQLVETRQITKHVAQILDSRMNTKYDENDKLIREVKVITLKSKLVSDFRKDFQFYKVREINNYHHAHDAYLNAVVGTALIKKYPKLESEFVYGDYKVYDVRKMIAKSEQEIGKATAKYFFYSNIMNFFKTEITLANGEIRKRPLIETNGETGEIVWDKGRDFATVRKVLSMPQVNIVKKTEVQTGGFSKESILPKRNSDKLIARKKDWDPKKYGGFDSPTVAYSVLVVAKVEKGKSKKLKSVKELLGITIMERSSFEKNPIDFLEAKGYKEVKKDLIIKLPKYSLFELENGRKRMLASAGELQKGNELALPSKYVNFLYLASHYEKLKGSPEDNEQKQLFVEQHKHYLDEIIEQISEFSKRVILADANLDKVLSAYNKHRDKPIREQAENIIHLFTLTNLGAPAAFKYFDTTIDRKRYTSTKEVLDATLIHQSITGLYETRIDLSQLGGDGGGSSEAAAKGGGGGVQEISDSRPMLHIYLNGRRFLGLLDTGADKTCIAGRDWPANWPIHQTESSLQGLGMACGVARSSQPLRWQHEDKSGIIHPFVIPTLPFTLWGRDIMKDIKVRLMTDSPDDSQDLMIGAIESNLFADQISWKSDQPVWLNQWPLKQEKLQALQQLVTEQLQLGHLEESNSPWNTPVFVIKKKSGKWRLLQDLRAVNATMHDMGALQPGLPSPVAVPKGWEIIIIDLQDCFFNIKLHPEDCKRFAFSVPSPNFKRPYQRFQWKVLPQGMKNSPTLCQKFVDKAILTVRDKYQDSYIVHYMDDILLAHPSRSIVDEILTSMIQALNKHGLVVSTEKIQKYDNLKYLGTHIQGDSVSYQKLQIRTDKLRTLNDFQKLLGNINWIRPFLKLTTGELKPLFEILNGDSNPISTRKLTPEACKALQLMNERLSTARVKRLDLSQPWSLCILKTEYTPTACLWQDGVVEWIHLPHISPKVITPYDIFCTQLIIKGRHRSKELFSKDPDYIVVPYTKVQFDLLLQEKEDWPISLLGFLGEVHFHLPKDPLLTFTLQTAIIFPHMTSTTPLEKGIVIFTDGSANGRSVTYIQGREPIIKENTQNTAQQAEIVAVITAFEEVSQPFNLYTDSKYVTGLFPEIETATLSPRTKIYTELKHLQRLIHKRQEKFYIGHIRGHTGLPGPLAQGNAYADSLTRILTAAGKRTADGSEFEKRTADGSEFESPKKKAKVE

SEQ ID NO: 3148 - protein, 2116 aa, synthetic construct
  source 1..2116: note = Description of Artificial Sequence: Synthetic polypeptide
MPAAKRVKLDGGDKKYSIGLDIGTNSVGWAVITDEYKVPSKKFKVLGNTDRHSIKKNLIGALLFDSGETAEATRLKRTARRRYTRRKNRICYLQEIFSNEMAKVDDSFFHRLEESFLVEEDKKHERHPIFGNIVDEVAYHEKYPTIYHLRKKLVDSTDKADLRLIYLALAHMIKFRGHFLIEGDLNPDNSDVDKLFIQLVQTYNQLFEENPINASGVDAKAILSARLSKSRRLENLIAQLPGEKKNGLFGNLIALSLGLTPNFKSNFDLAEDAKLQLSKDTYDDDLDNLLAQIGDQYADLFLAAKNLSDAILLSDILRVNTEITKAPLSASMIKRYDEHHQDLTLLKALVRQQLPEKYKEIFFDQSKNGYAGYIDGGASQEEFYKFIKPILEKMDGTEELLVKLNREDLLRKQRTFDNGSIPHQIHLGELHAILRRQEDFYPFLKDNREKIEKILTFRIPYYVGPLARGNSRFAWMTRKSEETITPWNFEEVVDKGASAQSFIERMTNFDKNLPNEKVLPKHSLLYEYFTVYNELTKVKYVTEGMRKPAFLSGEQKKAIVDLLFKTNRKVTVKQLKEDYFKKIECFDSVEISGVEDRFNASLGTYHDLLKIIKDKDFLDNEENEDILEDIVLTLTLFEDREMIEERLKTYAHLFDDKVMKQLKRRRYTGWGRLSRKLINGIRDKQSGKTILDFLKSDGFANRNFMQLIHDDSLTFKEDIQKAQVSGQGDSLHEHIANLAGSPAIKKGILQTVKVVDELVKVMGRHKPENIVIEMARENQTTQKGQKNSRERMKRIEEGIKELGSQILKEHPVENTQLQNEKLYLYYLQNGRDMYVDQELDINRLSDYDVDHIVPQSFLKDDSIDNKVLTRSDKARGKSDNVPSEEVVKKMKNYWRQLLNAKLITQRKFDNLTKAERGGLSELDKAGFIKRQLVETRQITKHVAQILDSRMNTKYDENDKLIREVKVITLKSKLVSDFRKDFQFYKVREINNYHHAHDAYLNAVVGTALIKKYPKLESEFVYGDYKVYDVRKMIAKSEQEIGKATAKYFFYSNIMNFFKTEITLANGEIRKRPLIETNGETGEIVWDKGRDFATVRKVLSMPQVNIVKKTEVQTGGFSKESILPKRNSDKLIARKKDWDPKKYGGFDSPTVAYSVLVVAKVEKGKSKKLKSVKELLGITIMERSSFEKNPIDFLEAKGYKEVKKDLIIKLPKYSLFELENGRKRMLASAGELQKGNELALPSKYVNFLYLASHYEKLKGSPEDNEQKQLFVEQHKHYLDEIIEQISEFSKRVILADANLDKVLSAYNKHRDKPIREQAENIIHLFTLTNLGAPAAFKYFDTTIDRKRYTSTKEVLDATLIHQSITGLYETRIDLSQLGGDGGEAAAKGGSGSSGGVQEISDSRPMLHIYLNGRRFLGLLDTGADKTCIAGRDWPANWPIHQTESSLQGLGMACGVARSSQPLRWQHEDKSGIIHPFVIPTLPFTLWGRDIMKDIKVRLMTDSPDDSQDLMIGAIESNLFADQISWKSDQPVWLNQWPLKQEKLQALQQLVTEQLQLGHLEESNSPWNTPVFVIKKKSGKWRLLQDLRAVNATMHDMGALQPGLPSPVAVPKGWEIIIIDLQDCFFNIKLHPEDCKRFAFSVPSPNFKRPYQRFQWKVLPQGMKNSPTLCQKFVDKAILTVRDKYQDSYIVHYMDDILLAHPSRSIVDEILTSMIQALNKHGLVVSTEKIQKYDNLKYLGTHIQGDSVSYQKLQIRTDKLRTLNDFQKLLGNINWIRPFLKLTTGELKPLFEILNGDSNPISTRKLTPEACKALQLMNERLSTARVKRLDLSQPWSLCILKTEYTPTACLWQDGVVEWIHLPHISPKVITPYDIFCTQLIIKGRHRSKELFSKDPDYIVVPYTKVQFDLLLQEKEDWPISLLGFLGEVHFHLPKDPLLTFTLQTAIIFPHMTSTTPLEKGIVIFTDGSANGRSVTYIQGREPIIKENTQNTAQQAEIVAVITAFEEVSQPFNLYTDSKYVTGLFPEIETATLSPRTKIYTELKHLQRLIHKRQEKFYIGHIRGHTGLPGPLAQGNAYADSLTRILTAAGKRTADGSEFEKRTADGSEFESPKKKAKVE

SEQ ID NO: 3149 - protein, 2116 aa, synthetic construct
  source 1..2116: note = Description of Artificial Sequence: Synthetic polypeptide
MPAAKRVKLDGGDKKYSIGLDIGTNSVGWAVITDEYKVPSKKFKVLGNTDRHSIKKNLIGALLFDSGETAEATRLKRTARRRYTRRKNRICYLQEIFSNEMAKVDDSFFHRLEESFLVEEDKKHERHPIFGNIVDEVAYHEKYPTIYHLRKKLVDSTDKADLRLIYLALAHMIKFRGHFLIEGDLNPDNSDVDKLFIQLVQTYNQLFEENPINASGVDAKAILSARLSKSRRLENLIAQLPGEKKNGLFGNLIALSLGLTPNFKSNFDLAEDAKLQLSKDTYDDDLDNLLAQIGDQYADLFLAAKNLSDAILLSDILRVNTEITKAPLSASMIKRYDEHHQDLTLLKALVRQQLPEKYKEIFFDQSKNGYAGYIDGGASQEEFYKFIKPILEKMDGTEELLVKLNREDLLRKQRTFDNGSIPHQIHLGELHAILRRQEDFYPFLKDNREKIEKILTFRIPYYVGPLARGNSRFAWMTRKSEETITPWNFEEVVDKGASAQSFIERMTNFDKNLPNEKVLPKHSLLYEYFTVYNELTKVKYVTEGMRKPAFLSGEQKKAIVDLLFKTNRKVTVKQLKEDYFKKIECFDSVEISGVEDRFNASLGTYHDLLKIIKDKDFLDNEENEDILEDIVLTLTLFEDREMIEERLKTYAHLFDDKVMKQLKRRRYTGWGRLSRKLINGIRDKQSGKTILDFLKSDGFANRNFMQLIHDDSLTFKEDIQKAQVSGQGDSLHEHIANLAGSPAIKKGILQTVKVVDELVKVMGRHKPENIVIEMARENQTTQKGQKNSRERMKRIEEGIKELGSQILKEHPVENTQLQNEKLYLYYLQNGRDMYVDQELDINRLSDYDVDHIVPQSFLKDDSIDNKVLTRSDKARGKSDNVPSEEVVKKMKNYWRQLLNAKLITQRKFDNLTKAERGGLSELDKAGFIKRQLVETRQITKHVAQILDSRMNTKYDENDKLIREVKVITLKSKLVSDFRKDFQFYKVREINNYHHAHDAYLNAVVGTALIKKYPKLESEFVYGDYKVYDVRKMIAKSEQEIGKATAKYFFYSNIMNFFKTEITLANGEIRKRPLIETNGETGEIVWDKGRDFATVRKVLSMPQVNIVKKTEVQTGGFSKESILPKRNSDKLIARKKDWDPKKYGGFDSPTVAYSVLVVAKVEKGKSKKLKSVKELLGITIMERSSFEKNPIDFLEAKGYKEVKKDLIIKLPKYSLFELENGRKRMLASAGELQKGNELALPSKYVNFLYLASHYEKLKGSPEDNEQKQLFVEQHKHYLDEIIEQISEFSKRVILADANLDKVLSAYNKHRDKPIREQAENIIHLFTLTNLGAPAAFKYFDTTIDRKRYTSTKEVLDATLIHQSITGLYETRIDLSQLGGDGGGSSPAPEAAAKGGVQEISDSRPMLHIYLNGRRFLGLLDTGADKTCIAGRDWPANWPIHQTESSLQGLGMACGVARSSQPLRWQHEDKSGIIHPFVIPTLPFTLWGRDIMKDIKVRLMTDSPDDSQDLMIGAIESNLFADQISWKSDQPVWLNQWPLKQEKLQALQQLVTEQLQLGHLEESNSPWNTPVFVIKKKSGKWRLLQDLRAVNATMHDMGALQPGLPSPVAVPKGWEIIIIDLQDCFFNIKLHPEDCKRFAFSVPSPNFKRPYQRFQWKVLPQGMKNSPTLCQKFVDKAILTVRDKYQDSYIVHYMDDILLAHPSRSIVDEILTSMIQALNKHGLVVSTEKIQKYDNLKYLGTHIQGDSVSYQKLQIRTDKLRTLNDFQKLLGNINWIRPFLKLTTGELKPLFEILNGDSNPISTRKLTPEACKALQLMNERLSTARVKRLDLSQPWSLCILKTEYTPTACLWQDGVVEWIHLPHISPKVITPYDIFCTQLIIKGRHRSKELFSKDPDYIVVPYTKVQFDLLLQEKEDWPISLLGFLGEVHFHLPKDPLLTFTLQTAIIFPHMTSTTPLEKGIVIFTDGSANGRSVTYIQGREPIIKENTQNTAQQAEIVAVITAFEEVSQPFNLYTDSKYVTGLFPEIETATLSPRTKIYTELKHLQRLIHKRQEKFYIGHIRGHTGLPGPLAQGNAYADSLTRILTAAGKRTADGSEFEKRTADGSEFESPKKKAKVE

SEQ ID NO: 3150 - protein, 2114 aa, synthetic construct
  source 1..2114: note = Description of Artificial Sequence: Synthetic polypeptide
MPAAKRVKLDGGDKKYSIGLDIGTNSVGWAVITDEYKVPSKKFKVLGNTDRHSIKKNLIGALLFDSGETAEATRLKRTARRRYTRRKNRICYLQEIFSNEMAKVDDSFFHRLEESFLVEEDKKHERHPIFGNIVDEVAYHEKYPTIYHLRKKLVDSTDKADLRLIYLALAHMIKFRGHFLIEGDLNPDNSDVDKLFIQLVQTYNQLFEENPINASGVDAKAILSARLSKSRRLENLIAQLPGEKKNGLFGNLIALSLGLTPNFKSNFDLAEDAKLQLSKDTYDDDLDNLLAQIGDQYADLFLAAKNLSDAILLSDILRVNTEITKAPLSASMIKRYDEHHQDLTLLKALVRQQLPEKYKEIFFDQSKNGYAGYIDGGASQEEFYKFIKPILEKMDGTEELLVKLNREDLLRKQRTFDNGSIPHQIHLGELHAILRRQEDFYPFLKDNREKIEKILTFRIPYYVGPLARGNSRFAWMTRKSEETITPWNFEEVVDKGASAQSFIERMTNFDKNLPNEKVLPKHSLLYEYFTVYNELTKVKYVTEGMRKPAFLSGEQKKAIVDLLFKTNRKVTVKQLKEDYFKKIECFDSVEISGVEDRFNASLGTYHDLLKIIKDKDFLDNEENEDILEDIVLTLTLFEDREMIEERLKTYAHLFDDKVMKQLKRRRYTGWGRLSRKLINGIRDKQSGKTILDFLKSDGFANRNFMQLIHDDSLTFKEDIQKAQVSGQGDSLHEHIANLAGSPAIKKGILQTVKVVDELVKVMGRHKPENIVIEMARENQTTQKGQKNSRERMKRIEEGIKELGSQILKEHPVENTQLQNEKLYLYYLQNGRDMYVDQELDINRLSDYDVDHIVPQSFLKDDSIDNKVLTRSDKARGKSDNVPSEEVVKKMKNYWRQLLNAKLITQRKFDNLTKAERGGLSELDKAGFIKRQLVETRQITKHVAQILDSRMNTKYDENDKLIREVKVITLKSKLVSDFRKDFQFYKVREINNYHHAHDAYLNAVVGTALIKKYPKLESEFVYGDYKVYDVRKMIAKSEQEIGKATAKYFFYSNIMNFFKTEITLANGEIRKRPLIETNGETGEIVWDKGRDFATVRKVLSMPQVNIVKKTEVQTGGFSKESILPKRNSDKLIARKKDWDPKKYGGFDSPTVAYSVLVVAKVEKGKSKKLKSVKELLGITIMERSSFEKNPIDFLEAKGYKEVKKDLIIKLPKYSLFELENGRKRMLASAGELQKGNELALPSKYVNFLYLASHYEKLKGSPEDNEQKQLFVEQHKHYLDEIIEQISEFSKRVILADANLDKVLSAYNKHRDKPIREQAENIIHLFTLTNLGAPAAFKYFDTTIDRKRYTSTKEVLDATLIHQSITGLYETRIDLSQLGGDGGGGSGSSPAPGGVQEISDSRPMLHIYLNGRRFLGLLDTGADKTCIAGRDWPANWPIHQTESSLQGLGMACGVARSSQPLRWQHEDKSGIIHPFVIPTLPFTLWGRDIMKDIKVRLMTDSPDDSQDLMIGAIESNLFADQISWKSDQPVWLNQWPLKQEKLQALQQLVTEQLQLGHLEESNSPWNTPVFVIKKKSGKWRLLQDLRAVNATMHDMGALQPGLPSPVAVPKGWEIIIIDLQDCFFNIKLHPEDCKRFAFSVPSPNFKRPYQRFQWKVLPQGMKNSPTLCQKFVDKAILTVRDKYQDSYIVHYMDDILLAHPSRSIVDEILTSMIQALNKHGLVVSTEKIQKYDNLKYLGTHIQGDSVSYQKLQIRTDKLRTLNDFQKLLGNINWIRPFLKLTTGELKPLFEILNGDSNPISTRKLTPEACKALQLMNERLSTARVKRLDLSQPWSLCILKTEYTPTACLWQDGVVEWIHLPHISPKVITPYDIFCTQLIIKGRHRSKELFSKDPDYIVVPYTKVQFDLLLQEKEDWPISLLGFLGEVHFHLPKDPLLTFTLQTAIIFPHMTSTTPLEKGIVIFTDGSANGRSVTYIQGREPIIKENTQNTAQQAEIVAVITAFEEVSQPFNLYTDSKYVTGLFPEIETATLSPRTKIYTELKHLQRLIHKRQEKFYIGHIRGHTGLPGPLAQGNAYADSLTRILTAAGKRTADGSEFEKRTADGSEFESPKKKAKVE

SEQ ID NO: 3151 - protein, 2120 aa, synthetic construct
  source 1..2120: note = Description of Artificial Sequence: Synthetic polypeptide
MPAAKRVKLDGGDKKYSIGLDIGTNSVGWAVITDEYKVPSKKFKVLGNTDRHSIKKNLIGALLFDSGETAEATRLKRTARRRYTRRKNRICYLQEIFSNEMAKVDDSFFHRLEESFLVEEDKKHERHPIFGNIVDEVAYHEKYPTIYHLRKKLVDSTDKADLRLIYLALAHMIKFRGHFLIEGDLNPDNSDVDKLFIQLVQTYNQLFEENPINASGVDAKAILSARLSKSRRLENLIAQLPGEKKNGLFGNLIALSLGLTPNFKSNFDLAEDAKLQLSKDTYDDDLDNLLAQIGDQYADLFLAAKNLSDAILLSDILRVNTEITKAPLSASMIKRYDEHHQDLTLLKALVRQQLPEKYKEIFFDQSKNGYAGYIDGGASQEEFYKFIKPILEKMDGTEELLVKLNREDLLRKQRTFDNGSIPHQIHLGELHAILRRQEDFYPFLKDNREKIEKILTFRIPYYVGPLARGNSRFAWMTRKSEETITPWNFEEVVDKGASAQSFIERMTNFDKNLPNEKVLPKHSLLYEYFTVYNELTKVKYVTEGMRKPAFLSGEQKKAIVDLLFKTNRKVTVKQLKEDYFKKIECFDSVEISGVEDRFNASLGTYHDLLKIIKDKDFLDNEENEDILEDIVLTLTLFEDREMIEERLKTYAHLFDDKVMKQLKRRRYTGWGRLSRKLINGIRDKQSGKTILDFLKSDGFANRNFMQLIHDDSLTFKEDIQKAQVSGQGDSLHEHIANLAGSPAIKKGILQTVKVVDELVKVMGRHKPENIVIEMARENQTTQKGQKNSRERMKRIEEGIKELGSQILKEHPVENTQLQNEKLYLYYLQNGRDMYVDQELDINRLSDYDVDHIVPQSFLKDDSIDNKVLTRSDKARGKSDNVPSEEVVKKMKNYWRQLLNAKLITQRKFDNLTKAERGGLSELDKAGFIKRQLVETRQITKHVAQILDSRMNTKYDENDKLIREVKVITLKSKLVSDFRKDFQFYKVREINNYHHAHDAYLNAVVGTALIKKYPKLESEFVYGDYKVYDVRKMIAKSEQEIGKATAKYFFYSNIMNFFKTEITLANGEIRKRPLIETNGETGEIVWDKGRDFATVRKVLSMPQVNIVKKTEVQTGGFSKESILPKRNSDKLIARKKDWDPKKYGGFDSPTVAYSVLVVAKVEKGKSKKLKSVKELLGITIMERSSFEKNPIDFLEAKGYKEVKKDLIIKLPKYSLFELENGRKRMLASAGELQKGNELALPSKYVNFLYLASHYEKLKGSPEDNEQKQLFVEQHKHYLDEIIEQISEFSKRVILADANLDKVLSAYNKHRDKPIREQAENIIHLFTLTNLGAPAAFKYFDTTIDRKRYTSTKEVLDATLIHQSITGLYETRIDLSQLGGDGGEAAAKGGGGSEAAAKGGVQEISDSRPMLHIYLNGRRFLGLLDTGADKTCIAGRDWPANWPIHQTESSLQGLGMACGVARSSQPLRWQHEDKSGIIHPFVIPTLPFTLWGRDIMKDIKVRLMTDSPDDSQDLMIGAIESNLFADQISWKSDQPVWLNQWPLKQEKLQALQQLVTEQLQLGHLEESNSPWNTPVFVIKKKSGKWRLLQDLRAVNATMHDMGALQPGLPSPVAVPKGWEIIIIDLQDCFFNIKLHPEDCKRFAFSVPSPNFKRPYQRFQWKVLPQGMKNSPTLCQKFVDKAILTVRDKYQDSYIVHYMDDILLAHPSRSIVDEILTSMIQALNKHGLVVSTEKIQKYDNLKYLGTHIQGDSVSYQKLQIRTDKLRTLNDFQKLLGNINWIRPFLKLTTGELKPLFEILNGDSNPISTRKLTPEACKALQLMNERLSTARVKRLDLSQPWSLCILKTEYTPTACLWQDGVVEWIHLPHISPKVITPYDIFCTQLIIKGRHRSKELFSKDPDYIVVPYTKVQFDLLLQEKEDWPISLLGFLGEVHFHLPKDPLLTFTLQTAIIFPHMTSTTPLEKGIVIFTDGSANGRSVTYIQGREPIIKENTQNTAQQAEIVAVITAFEEVSQPFNLYTDSKYVTGLFPEIETATLSPRTKIYTELKHLQRLIHKRQEKFYIGHIRGHTGLPGPLAQGNAYADSLTRILTAAGKRTADGSEFEKRTADGSEFESPKKKAKVE

SEQ ID NO: 3152 - protein, 2116 aa, synthetic construct
  source 1..2116: note = Description of Artificial Sequence: Synthetic polypeptide
MPAAKRVKLDGGDKKYSIGLDIGTNSVGWAVITDEYKVPSKKFKVLGNTDRHSIKKNLIGALLFDSGETAEATRLKRTARRRYTRRKNRICYLQEIFSNEMAKVDDSFFHRLEESFLVEEDKKHERHPIFGNIVDEVAYHEKYPTIYHLRKKLVDSTDKADLRLIYLALAHMIKFRGHFLIEGDLNPDNSDVDKLFIQLVQTYNQLFEENPINASGVDAKAILSARLSKSRRLENLIAQLPGEKKNGLFGNLIALSLGLTPNFKSNFDLAEDAKLQLSKDTYDDDLDNLLAQIGDQYADLFLAAKNLSDAILLSDILRVNTEITKAPLSASMIKRYDEHHQDLTLLKALVRQQLPEKYKEIFFDQSKNGYAGYIDGGASQEEFYKFIKPILEKMDGTEELLVKLNREDLLRKQRTFDNGSIPHQIHLGELHAILRRQEDFYPFLKDNREKIEKILTFRIPYYVGPLARGNSRFAWMTRKSEETITPWNFEEVVDKGASAQSFIERMTNFDKNLPNEKVLPKHSLLYEYFTVYNELTKVKYVTEGMRKPAFLSGEQKKAIVDLLFKTNRKVTVKQLKEDYFKKIECFDSVEISGVEDRFNASLGTYHDLLKIIKDKDFLDNEENEDILEDIVLTLTLFEDREMIEERLKTYAHLFDDKVMKQLKRRRYTGWGRLSRKLINGIRDKQSGKTILDFLKSDGFANRNFMQLIHDDSLTFKEDIQKAQVSGQGDSLHEHIANLAGSPAIKKGILQTVKVVDELVKVMGRHKPENIVIEMARENQTTQKGQKNSRERMKRIEEGIKELGSQILKEHPVENTQLQNEKLYLYYLQNGRDMYVDQELDINRLSDYDVDHIVPQSFLKDDSIDNKVLTRSDKARGKSDNVPSEEVVKKMKNYWRQLLNAKLITQRKFDNLTKAERGGLSELDKAGFIKRQLVETRQITKHVAQILDSRMNTKYDENDKLIREVKVITLKSKLVSDFRKDFQFYKVREINNYHHAHDAYLNAVVGTALIKKYPKLESEFVYGDYKVYDVRKMIAKSEQEIGKATAKYFFYSNIMNFFKTEITLANGEIRKRPLIETNGETGEIVWDKGRDFATVRKVLSMPQVNIVKKTEVQTGGFSKESILPKRNSDKLIARKKDWDPKKYGGFDSPTVAYSVLVVAKVEKGKSKKLKSVKELLGITIMERSSFEKNPIDFLEAKGYKEVKKDLIIKLPKYSLFELENGRKRMLASAGELQKGNELALPSKYVNFLYLASHYEKLKGSPEDNEQKQLFVEQHKHYLDEIIEQISEFSKRVILADANLDKVLSAYNKHRDKPIREQAENIIHLFTLTNLGAPAAFKYFDTTIDRKRYTSTKEVLDATLIHQSITGLYETRIDLSQLGGDGGPAPEAAAKGSSGGVQEISDSRPMLHIYLNGRRFLGLLDTGADKTCIAGRDWPANWPIHQTESSLQGLGMACGVARSSQPLRWQHEDKSGIIHPFVIPTLPFTLWGRDIMKDIKVRLMTDSPDDSQDLMIGAIESNLFADQISWKSDQPVWLNQWPLKQEKLQALQQLVTEQLQLGHLEESNSPWNTPVFVIKKKSGKWRLLQDLRAVNATMHDMGALQPGLPSPVAVPKGWEIIIIDLQDCFFNIKLHPEDCKRFAFSVPSPNFKRPYQRFQWKVLPQGMKNSPTLCQKFVDKAILTVRDKYQDSYIVHYMDDILLAHPSRSIVDEILTSMIQALNKHGLVVSTEKIQKYDNLKYLGTHIQGDSVSYQKLQIRTDKLRTLNDFQKLLGNINWIRPFLKLTTGELKPLFEILNGDSNPISTRKLTPEACKALQLMNERLSTARVKRLDLSQPWSLCILKTEYTPTACLWQDGVVEWIHLPHISPKVITPYDIFCTQLIIKGRHRSKELFSKDPDYIVVPYTKVQFDLLLQEKEDWPISLLGFLGEVHFHLPKDPLLTFTLQTAIIFPHMTSTTPLEKGIVIFTDGSANGRSVTYIQGREPIIKENTQNTAQQAEIVAVITAFEEVSQPFNLYTDSKYVTGLFPEIETATLSPRTKIYTELKHLQRLIHKRQEKFYIGHIRGHTGLPGPLAQGNAYADSLTRILTAAGKRTADGSEFEKRTADGSEFESPKKKAKVE

SEQ ID NO: 3153 - protein, 2121 aa, synthetic construct
  source 1..2121: note = Description of Artificial Sequence: Synthetic polypeptide
MPAAKRVKLDGGDKKYSIGLDIGTNSVGWAVITDEYKVPSKKFKVLGNTDRHSIKKNLIGALLFDSGETAEATRLKRTARRRYTRRKNRICYLQEIFSNEMAKVDDSFFHRLEESFLVEEDKKHERHPIFGNIVDEVAYHEKYPTIYHLRKKLVDSTDKADLRLIYLALAHMIKFRGHFLIEGDLNPDNSDVDKLFIQLVQTYNQLFEENPINASGVDAKAILSARLSKSRRLENLIAQLPGEKKNGLFGNLIALSLGLTPNFKSNFDLAEDAKLQLSKDTYDDDLDNLLAQIGDQYADLFLAAKNLSDAILLSDILRVNTEITKAPLSASMIKRYDEHHQDLTLLKALVRQQLPEKYKEIFFDQSKNGYAGYIDGGASQEEFYKFIKPILEKMDGTEELLVKLNREDLLRKQRTFDNGSIPHQIHLGELHAILRRQEDFYPFLKDNREKIEKILTFRIPYYVGPLARGNSRFAWMTRKSEETITPWNFEEVVDKGASAQSFIERMTNFDKNLPNEKVLPKHSLLYEYFTVYNELTKVKYVTEGMRKPAFLSGEQKKAIVDLLFKTNRKVTVKQLKEDYFKKIECFDSVEISGVEDRFNASLGTYHDLLKIIKDKDFLDNEENEDILEDIVLTLTLFEDREMIEERLKTYAHLFDDKVMKQLKRRRYTGWGRLSRKLINGIRDKQSGKTILDFLKSDGFANRNFMQLIHDDSLTFKEDIQKAQVSGQGDSLHEHIANLAGSPAIKKGILQTVKVVDELVKVMGRHKPENIVIEMARENQTTQKGQKNSRERMKRIEEGIKELGSQILKEHPVENTQLQNEKLYLYYLQNGRDMYVDQELDINRLSDYDVDHIVPQSFLKDDSIDNKVLTRSDKARGKSDNVPSEEVVKKMKNYWRQLLNAKLITQRKFDNLTKAERGGLSELDKAGFIKRQLVETRQITKHVAQILDSRMNTKYDENDKLIREVKVITLKSKLVSDFRKDFQFYKVREINNYHHAHDAYLNAVVGTALIKKYPKLESEFVYGDYKVYDVRKMIAKSEQEIGKATAKYFFYSNIMNFFKTEITLANGEIRKRPLIETNGETGEIVWDKGRDFATVRKVLSMPQVNIVKKTEVQTGGFSKESILPKRNSDKLIARKKDWDPKKYGGFDSPTVAYSVLVVAKVEKGKSKKLKSVKELLGITIMERSSFEKNPIDFLEAKGYKEVKKDLIIKLPKYSLFELENGRKRMLASAGELQKGNELALPSKYVNFLYLASHYEKLKGSPEDNEQKQLFVEQHKHYLDEIIEQISEFSKRVILADANLDKVLSAYNKHRDKPIREQAENIIHLFTLTNLGAPAAFKYFDTTIDRKRYTSTKEVLDATLIHQSITGLYETRIDLSQLGGDGGSGSETPGTSESATPESGGVQEISDSRPMLHIYLNGRRFLGLLDTGADKTCIAGRDWPANWPIHQTESSLQGLGMACGVARSSQPLRWQHEDKSGIIHPFVIPTLPFTLWGRDIMKDIKVRLMTDSPDDSQDLMIGAIESNLFADQISWKSDQPVWLNQWPLKQEKLQALQQLVTEQLQLGHLEESNSPWNTPVFVIKKKSGKWRLLQDLRAVNATMHDMGALQPGLPSPVAVPKGWEIIIIDLQDCFFNIKLHPEDCKRFAFSVPSPNFKRPYQRFQWKVLPQGMKNSPTLCQKFVDKAILTVRDKYQDSYIVHYMDDILLAHPSRSIVDEILTSMIQALNKHGLVVSTEKIQKYDNLKYLGTHIQGDSVSYQKLQIRTDKLRTLNDFQKLLGNINWIRPFLKLTTGELKPLFEILNGDSNPISTRKLTPEACKALQLMNERLSTARVKRLDLSQPWSLCILKTEYTPTACLWQDGVVEWIHLPHISPKVITPYDIFCTQLIIKGRHRSKELFSKDPDYIVVPYTKVQFDLLLQEKEDWPISLLGFLGEVHFHLPKDPLLTFTLQTAIIFPHMTSTTPLEKGIVIFTDGSANGRSVTYIQGREPIIKENTQNTAQQAEIVAVITAFEEVSQPFNLYTDSKYVTGLFPEIETATLSPRTKIYTELKHLQRLIHKRQEKFYIGHIRGHTGLPGPLAQGNAYADSLTRILTAAGKRTADGSEFEKRTADGSEFESPKKKAKVE

SEQ ID NO: 3154 - protein, 2116 aa, synthetic construct
  source 1..2116: note = Description of Artificial Sequence: Synthetic polypeptide
MPAAKRVKLDGGDKKYSIGLDIGTNSVGWAVITDEYKVPSKKFKVLGNTDRHSIKKNLIGALLFDSGETAEATRLKRTARRRYTRRKNRICYLQEIFSNEMAKVDDSFFHRLEESFLVEEDKKHERHPIFGNIVDEVAYHEKYPTIYHLRKKLVDSTDKADLRLIYLALAHMIKFRGHFLIEGDLNPDNSDVDKLFIQLVQTYNQLFEENPINASGVDAKAILSARLSKSRRLENLIAQLPGEKKNGLFGNLIALSLGLTPNFKSNFDLAEDAKLQLSKDTYDDDLDNLLAQIGDQYADLFLAAKNLSDAILLSDILRVNTEITKAPLSASMIKRYDEHHQDLTLLKALVRQQLPEKYKEIFFDQSKNGYAGYIDGGASQEEFYKFIKPILEKMDGTEELLVKLNREDLLRKQRTFDNGSIPHQIHLGELHAILRRQEDFYPFLKDNREKIEKILTFRIPYYVGPLARGNSRFAWMTRKSEETITPWNFEEVVDKGASAQSFIERMTNFDKNLPNEKVLPKHSLLYEYFTVYNELTKVKYVTEGMRKPAFLSGEQKKAIVDLLFKTNRKVTVKQLKEDYFKKIECFDSVEISGVEDRFNASLGTYHDLLKIIKDKDFLDNEENEDILEDIVLTLTLFEDREMIEERLKTYAHLFDDKVMKQLKRRRYTGWGRLSRKLINGIRDKQSGKTILDFLKSDGFANRNFMQLIHDDSLTFKEDIQKAQVSGQGDSLHEHIANLAGSPAIKKGILQTVKVVDELVKVMGRHKPENIVIEMARENQTTQKGQKNSRERMKRIEEGIKELGSQILKEHPVENTQLQNEKLYLYYLQNGRDMYVDQELDINRLSDYDVDHIVPQSFLKDDSIDNKVLTRSDKARGKSDNVPSEEVVKKMKNYWRQLLNAKLITQRKFDNLTKAERGGLSELDKAGFIKRQLVETRQITKHVAQILDSRMNTKYDENDKLIREVKVITLKSKLVSDFRKDFQFYKVREINNYHHAHDAYLNAVVGTALIKKYPKLESEFVYGDYKVYDVRKMIAKSEQEIGKATAKYFFYSNIMNFFKTEITLANGEIRKRPLIETNGETGEIVWDKGRDFATVRKVLSMPQVNIVKKTEVQTGGFSKESILPKRNSDKLIARKKDWDPKKYGGFDSPTVAYSVLVVAKVEKGKSKKLKSVKELLGITIMERSSFEKNPIDFLEAKGYKEVKKDLIIKLPKYSLFELENGRKRMLASAGELQKGNELALPSKYVNFLYLASHYEKLKGSPEDNEQKQLFVEQHKHYLDEIIEQISEFSKRVILADANLDKVLSAYNKHRDKPIREQAENIIHLFTLTNLGAPAAFKYFDTTIDRKRYTSTKEVLDATLIHQSITGLYETRIDLSQLGGDGGGGSEAAAKGGGGGVQEISDSRPMLHIYLNGRRFLGLLDTGADKTCIAGRDWPANWPIHQTESSLQGLGMACGVARSSQPLRWQHEDKSGIIHPFVIPTLPFTLWGRDIMKDIKVRLMTDSPDDSQDLMIGAIESNLFADQISWKSDQPVWLNQWPLKQEKLQALQQLVTEQLQLGHLEESNSPWNTPVFVIKKKSGKWRLLQDLRAVNATMHDMGALQPGLPSPVAVPKGWEIIIIDLQDCFFNIKLHPEDCKRFAFSVPSPNFKRPYQRFQWKVLPQGMKNSPTLCQKFVDKAILTVRDKYQDSYIVHYMDDILLAHPSRSIVDEILTSMIQALNKHGLVVSTEKIQKYDNLKYLGTHIQGDSVSYQKLQIRTDKLRTLNDFQKLLGNINWIRPFLKLTTGELKPLFEILNGDSNPISTRKLTPEACKALQLMNERLSTARVKRLDLSQPWSLCILKTEYTPTACLWQDGVVEWIHLPHISPKVITPYDIFCTQLIIKGRHRSKELFSKDPDYIVVPYTKVQFDLLLQEKEDWPISLLGFLGEVHFHLPKDPLLTFTLQTAIIFPHMTSTTPLEKGIVIFTDGSANGRSVTYIQGREPIIKENTQNTAQQAEIVAVITAFEEVSQPFNLYTDSKYVTGLFPEIETATLSPRTKIYTELKHLQRLIHKRQEKFYIGHIRGHTGLPGPLAQGNAYADSLTRILTAAGKRTADGSEFEKRTADGSEFESPKKKAKVE

SEQ ID NO: 3155 - protein, 2114 aa, synthetic construct
  source 1..2114: note = Description of Artificial Sequence: Synthetic polypeptide
MPAAKRVKLDGGDKKYSIGLDIGTNSVGWAVITDEYKVPSKKFKVLGNTDRHSIKKNLIGALLFDSGETAEATRLKRTARRRYTRRKNRICYLQEIFSNEMAKVDDSFFHRLEESFLVEEDKKHERHPIFGNIVDEVAYHEKYPTIYHLRKKLVDSTDKADLRLIYLALAHMIKFRGHFLIEGDLNPDNSDVDKLFIQLVQTYNQLFEENPINASGVDAKAILSARLSKSRRLENLIAQLPGEKKNGLFGNLIALSLGLTPNFKSNFDLAEDAKLQLSKDTYDDDLDNLLAQIGDQYADLFLAAKNLSDAILLSDILRVNTEITKAPLSASMIKRYDEHHQDLTLLKALVRQQLPEKYKEIFFDQSKNGYAGYIDGGASQEEFYKFIKPILEKMDGTEELLVKLNREDLLRKQRTFDNGSIPHQIHLGELHAILRRQEDFYPFLKDNREKIEKILTFRIPYYVGPLARGNSRFAWMTRKSEETITPWNFEEVVDKGASAQSFIERMTNFDKNLPNEKVLPKHSLLYEYFTVYNELTKVKYVTEGMRKPAFLSGEQKKAIVDLLFKTNRKVTVKQLKEDYFKKIECFDSVEISGVEDRFNASLGTYHDLLKIIKDKDFLDNEENEDILEDIVLTLTLFEDREMIEERLKTYAHLFDDKVMKQLKRRRYTGWGRLSRKLINGIRDKQSGKTILDFLKSDGFANRNFMQLIHDDSLTFKEDIQKAQVSGQGDSLHEHIANLAGSPAIKKGILQTVKVVDELVKVMGRHKPENIVIEMARENQTTQKGQKNSRERMKRIEEGIKELGSQILKEHPVENTQLQNEKLYLYYLQNGRDMYVDQELDINRLSDYDVDHIVPQSFLKDDSIDNKVLTRSDKARGKSDNVPSEEVVKKMKNYWRQLLNAKLITQRKFDNLTKAERGGLSELDKAGFIKRQLVETRQITKHVAQILDSRMNTKYDENDKLIREVKVITLKSKLVSDFRKDFQFYKVREINNYHHAHDAYLNAVVGTALIKKYPKLESEFVYGDYKVYDVRKMIAKSEQEIGKATAKYFFYSNIMNFFKTEITLANGEIRKRPLIETNGETGEIVWDKGRDFATVRKVLSMPQVNIVKKTEVQTGGFSKESILPKRNSDKLIARKKDWDPKKYGGFDSPTVAYSVLVVAKVEKGKSKKLKSVKELLGITIMERSSFEKNPIDFLEAKGYKEVKKDLIIKLPKYSLFELENGRKRMLASAGELQKGNELALPSKYVNFLYLASHYEKLKGSPEDNEQKQLFVEQHKHYLDEIIEQISEFSKRVILADANLDKVLSAYNKHRDKPIREQAENIIHLFTLTNLGAPAAFKYFDTTIDRKRYTSTKEVLDATLIHQSITGLYETRIDLSQLGGDGGPAPGGSGSSGGVQEISDSRPMLHIYLNGRRFLGLLDTGADKTCIAGRDWPANWPIHQTESSLQGLGMACGVARSSQPLRWQHEDKSGIIHPFVIPTLPFTLWGRDIMKDIKVRLMTDSPDDSQDLMIGAIESNLFADQISWKSDQPVWLNQWPLKQEKLQALQQLVTEQLQLGHLEESNSPWNTPVFVIKKKSGKWRLLQDLRAVNATMHDMGALQPGLPSPVAVPKGWEIIIIDLQDCFFNIKLHPEDCKRFAFSVPSPNFKRPYQRFQWKVLPQGMKNSPTLCQKFVDKAILTVRDKYQDSYIVHYMDDILLAHPSRSIVDEILTSMIQALNKHGLVVSTEKIQKYDNLKYLGTHIQGDSVSYQKLQIRTDKLRTLNDFQKLLGNINWIRPFLKLTTGELKPLFEILNGDSNPISTRKLTPEACKALQLMNERLSTARVKRLDLSQPWSLCILKTEYTPTACLWQDGVVEWIHLPHISPKVITPYDIFCTQLIIKGRHRSKELFSKDPDYIVVPYTKVQFDLLLQEKEDWPISLLGFLGEVHFHLPKDPLLTFTLQTAIIFPHMTSTTPLEKGIVIFTDGSANGRSVTYIQGREPIIKENTQNTAQQAEIVAVITAFEEVSQPFNLYTDSKYVTGLFPEIETATLSPRTKIYTELKHLQRLIHKRQEKFYIGHIRGHTGLPGPLAQGNAYADSLTRILTAAGKRTADGSEFEKRTADGSEFESPKKKAKVE

SEQ ID NO: 3156 - protein, 2116 aa, synthetic construct
  source 1..2116: note = Description of Artificial Sequence: Synthetic polypeptide
MPAAKRVKLDGGDKKYSIGLDIGTNSVGWAVITDEYKVPSKKFKVLGNTDRHSIKKNLIGALLFDSGETAEATRLKRTARRRYTRRKNRICYLQEIFSNEMAKVDDSFFHRLEESFLVEEDKKHERHPIFGNIVDEVAYHEKYPTIYHLRKKLVDSTDKADLRLIYLALAHMIKFRGHFLIEGDLNPDNSDVDKLFIQLVQTYNQLFEENPINASGVDAKAILSARLSKSRRLENLIAQLPGEKKNGLFGNLIALSLGLTPNFKSNFDLAEDAKLQLSKDTYDDDLDNLLAQIGDQYADLFLAAKNLSDAILLSDILRVNTEITKAPLSASMIKRYDEHHQDLTLLKALVRQQLPEKYKEIFFDQSKNGYAGYIDGGASQEEFYKFIKPILEKMDGTEELLVKLNREDLLRKQRTFDNGSIPHQIHLGELHAILRRQEDFYPFLKDNREKIEKILTFRIPYYVGPLARGNSRFAWMTRKSEETITPWNFEEVVDKGASAQSFIERMTNFDKNLPNEKVLPKHSLLYEYFTVYNELTKVKYVTEGMRKPAFLSGEQKKAIVDLLFKTNRKVTVKQLKEDYFKKIECFDSVEISGVEDRFNASLGTYHDLLKIIKDKDFLDNEENEDILEDIVLTLTLFEDREMIEERLKTYAHLFDDKVMKQLKRRRYTGWGRLSRKLINGIRDKQSGKTILDFLKSDGFANRNFMQLIHDDSLTFKEDIQKAQVSGQGDSLHEHIANLAGSPAIKKGILQTVKVVDELVKVMGRHKPENIVIEMARENQTTQKGQKNSRERMKRIEEGIKELGSQILKEHPVENTQLQNEKLYLYYLQNGRDMYVDQELDINRLSDYDVDHIVPQSFLKDDSIDNKVLTRSDKARGKSDNVPSEEVVKKMKNYWRQLLNAKLITQRKFDNLTKAERGGLSELDKAGFIKRQLVETRQITKHVAQILDSRMNTKYDENDKLIREVKVITLKSKLVSDFRKDFQFYKVREINNYHHAHDAYLNAVVGTALIKKYPKLESEFVYGDYKVYDVRKMIAKSEQEIGKATAKYFFYSNIMNFFKTEITLANGEIRKRPLIETNGETGEIVWDKGRDFATVRKVLSMPQVNIVKKTEVQTGGFSKESILPKRNSDKLIARKKDWDPKKYGGFDSPTVAYSVLVVAKVEKGKSKKLKSVKELLGITIMERSSFEKNPIDFLEAKGYKEVKKDLIIKLPKYSLFELENGRKRMLASAGELQKGNELALPSKYVNFLYLASHYEKLKGSPEDNEQKQLFVEQHKHYLDEIIEQISEFSKRVILADANLDKVLSAYNKHRDKPIREQAENIIHLFTLTNLGAPAAFKYFDTTIDRKRYTSTKEVLDATLIHQSITGLYETRIDLSQLGGDGGEAAAKGGGGGSGGVQEISDSRPMLHIYLNGRRFLGLLDTGADKTCIAGRDWPANWPIHQTESSLQGLGMACGVARSSQPLRWQHEDKSGIIHPFVIPTLPFTLWGRDIMKDIKVRLMTDSPDDSQDLMIGAIESNLFADQISWKSDQPVWLNQWPLKQEKLQALQQLVTEQLQLGHLEESNSPWNTPVFVIKKKSGKWRLLQDLRAVNATMHDMGALQPGLPSPVAVPKGWEIIIIDLQDCFFNIKLHPEDCKRFAFSVPSPNFKRPYQRFQWKVLPQGMKNSPTLCQKFVDKAILTVRDKYQDSYIVHYMDDILLAHPSRSIVDEILTSMIQALNKHGLVVSTEKIQKYDNLKYLGTHIQGDSVSYQKLQIRTDKLRTLNDFQKLLGNINWIRPFLKLTTGELKPLFEILNGDSNPISTRKLTPEACKALQLMNERLSTARVKRLDLSQPWSLCILKTEYTPTACLWQDGVVEWIHLPHISPKVITPYDIFCTQLIIKGRHRSKELFSKDPDYIVVPYTKVQFDLLLQEKEDWPISLLGFLGEVHFHLPKDPLLTFTLQTAIIFPHMTSTTPLEKGIVIFTDGSANGRSVTYIQGREPIIKENTQNTAQQAEIVAVITAFEEVSQPFNLYTDSKYVTGLFPEIETATLSPRTKIYTELKHLQRLIHKRQEKFYIGHIRGHTGLPGPLAQGNAYADSLTRILTAAGKRTADGSEFEKRTADGSEFESPKKKAKVE

SEQ ID NO: 3157 - protein, 2125 aa, synthetic construct
  source 1..2125: note = Description of Artificial Sequence: Synthetic polypeptide
MPAAKRVKLDGGDKKYSIGLDIGTNSVGWAVITDEYKVPSKKFKVLGNTDRHSIKKNLIGALLFDSGETAEATRLKRTARRRYTRRKNRICYLQEIFSNEMAKVDDSFFHRLEESFLVEEDKKHERHPIFGNIVDEVAYHEKYPTIYHLRKKLVDSTDKADLRLIYLALAHMIKFRGHFLIEGDLNPDNSDVDKLFIQLVQTYNQLFEENPINASGVDAKAILSARLSKSRRLENLIAQLPGEKKNGLFGNLIALSLGLTPNFKSNFDLAEDAKLQLSKDTYDDDLDNLLAQIGDQYADLFLAAKNLSDAILLSDILRVNTEITKAPLSASMIKRYDEHHQDLTLLKALVRQQLPEKYKEIFFDQSKNGYAGYIDGGASQEEFYKFIKPILEKMDGTEELLVKLNREDLLRKQRTFDNGSIPHQIHLGELHAILRRQEDFYPFLKDNREKIEKILTFRIPYYVGPLARGNSRFAWMTRKSEETITPWNFEEVVDKGASAQSFIERMTNFDKNLPNEKVLPKHSLLYEYFTVYNELTKVKYVTEGMRKPAFLSGEQKKAIVDLLFKTNRKVTVKQLKEDYFKKIECFDSVEISGVEDRFNASLGTYHDLLKIIKDKDFLDNEENEDILEDIVLTLTLFEDREMIEERLKTYAHLFDDKVMKQLKRRRYTGWGRLSRKLINGIRDKQSGKTILDFLKSDGFANRNFMQLIHDDSLTFKEDIQKAQVSGQGDSLHEHIANLAGSPAIKKGILQTVKVVDELVKVMGRHKPENIVIEMARENQTTQKGQKNSRERMKRIEEGIKELGSQILKEHPVENTQLQNEKLYLYYLQNGRDMYVDQELDINRLSDYDVDHIVPQSFLKDDSIDNKVLTRSDKARGKSDNVPSEEVVKKMKNYWRQLLNAKLITQRKFDNLTKAERGGLSELDKAGFIKRQLVETRQITKHVAQILDSRMNTKYDENDKLIREVKVITLKSKLVSDFRKDFQFYKVREINNYHHAHDAYLNAVVGTALIKKYPKLESEFVYGDYKVYDVRKMIAKSEQEIGKATAKYFFYSNIMNFFKTEITLANGEIRKRPLIETNGETGEIVWDKGRDFATVRKVLSMPQVNIVKKTEVQTGGFSKESILPKRNSDKLIARKKDWDPKKYGGFDSPTVAYSVLVVAKVEKGKSKKLKSVKELLGITIMERSSFEKNPIDFLEAKGYKEVKKDLIIKLPKYSLFELENGRKRMLASAGELQKGNELALPSKYVNFLYLASHYEKLKGSPEDNEQKQLFVEQHKHYLDEIIEQISEFSKRVILADANLDKVLSAYNKHRDKPIREQAENIIHLFTLTNLGAPAAFKYFDTTIDRKRYTSTKEVLDATLIHQSITGLYETRIDLSQLGGDGGEAAAKEAAAKEAAAKEAAAKGGVQEISDSRPMLHIYLNGRRFLGLLDTGADKTCIAGRDWPANWPIHQTESSLQGLGMACGVARSSQPLRWQHEDKSGIIHPFVIPTLPFTLWGRDIMKDIKVRLMTDSPDDSQDLMIGAIESNLFADQISWKSDQPVWLNQWPLKQEKLQALQQLVTEQLQLGHLEESNSPWNTPVFVIKKKSGKWRLLQDLRAVNATMHDMGALQPGLPSPVAVPKGWEIIIIDLQDCFFNIKLHPEDCKRFAFSVPSPNFKRPYQRFQWKVLPQGMKNSPTLCQKFVDKAILTVRDKYQDSYIVHYMDDILLAHPSRSIVDEILTSMIQALNKHGLVVSTEKIQKYDNLKYLGTHIQGDSVSYQKLQIRTDKLRTLNDFQKLLGNINWIRPFLKLTTGELKPLFEILNGDSNPISTRKLTPEACKALQLMNERLSTARVKRLDLSQPWSLCILKTEYTPTACLWQDGVVEWIHLPHISPKVITPYDIFCTQLIIKGRHRSKELFSKDPDYIVVPYTKVQFDLLLQEKEDWPISLLGFLGEVHFHLPKDPLLTFTLQTAIIFPHMTSTTPLEKGIVIFTDGSANGRSVTYIQGREPIIKENTQNTAQQAEIVAVITAFEEVSQPFNLYTDSKYVTGLFPEIETATLSPRTKIYTELKHLQRLIHKRQEKFYIGHIRGHTGLPGPLAQGNAYADSLTRILTAAGKRTADGSEFEKRTADGSEFESPKKKAKVE

SEQ ID NO: 3158 - protein, 2116 aa, synthetic construct
  source 1..2116: note = Description of Artificial Sequence: Synthetic polypeptide
MPAAKRVKLDGGDKKYSIGLDIGTNSVGWAVITDEYKVPSKKFKVLGNTDRHSIKKNLIGALLFDSGETAEATRLKRTARRRYTRRKNRICYLQEIFSNEMAKVDDSFFHRLEESFLVEEDKKHERHPIFGNIVDEVAYHEKYPTIYHLRKKLVDSTDKADLRLIYLALAHMIKFRGHFLIEGDLNPDNSDVDKLFIQLVQTYNQLFEENPINASGVDAKAILSARLSKSRRLENLIAQLPGEKKNGLFGNLIALSLGLTPNFKSNFDLAEDAKLQLSKDTYDDDLDNLLAQIGDQYADLFLAAKNLSDAILLSDILRVNTEITKAPLSASMIKRYDEHHQDLTLLKALVRQQLPEKYKEIFFDQSKNGYAGYIDGGASQEEFYKFIKPILEKMDGTEELLVKLNREDLLRKQRTFDNGSIPHQIHLGELHAILRRQEDFYPFLKDNREKIEKILTFRIPYYVGPLARGNSRFAWMTRKSEETITPWNFEEVVDKGASAQSFIERMTNFDKNLPNEKVLPKHSLLYEYFTVYNELTKVKYVTEGMRKPAFLSGEQKKAIVDLLFKTNRKVTVKQLKEDYFKKIECFDSVEISGVEDRFNASLGTYHDLLKIIKDKDFLDNEENEDILEDIVLTLTLFEDREMIEERLKTYAHLFDDKVMKQLKRRRYTGWGRLSRKLINGIRDKQSGKTILDFLKSDGFANRNFMQLIHDDSLTFKEDIQKAQVSGQGDSLHEHIANLAGSPAIKKGILQTVKVVDELVKVMGRHKPENIVIEMARENQTTQKGQKNSRERMKRIEEGIKELGSQILKEHPVENTQLQNEKLYLYYLQNGRDMYVDQELDINRLSDYDVDHIVPQSFLKDDSIDNKVLTRSDKARGKSDNVPSEEVVKKMKNYWRQLLNAKLITQRKFDNLTKAERGGLSELDKAGFIKRQLVETRQITKHVAQILDSRMNTKYDENDKLIREVKVITLKSKLVSDFRKDFQFYKVREINNYHHAHDAYLNAVVGTALIKKYPKLESEFVYGDYKVYDVRKMIAKSEQEIGKATAKYFFYSNIMNFFKTEITLANGEIRKRPLIETNGETGEIVWDKGRDFATVRKVLSMPQVNIVKKTEVQTGGFSKESILPKRNSDKLIARKKDWDPKKYGGFDSPTVAYSVLVVAKVEKGKSKKLKSVKELLGITIMERSSFEKNPIDFLEAKGYKEVKKDLIIKLPKYSLFELENGRKRMLASAGELQKGNELALPSKYVNFLYLASHYEKLKGSPEDNEQKQLFVEQHKHYLDEIIEQISEFSKRVILADANLDKVLSAYNKHRDKPIREQAENIIHLFTLTNLGAPAAFKYFDTTIDRKRYTSTKEVLDATLIHQSITGLYETRIDLSQLGGDGGGGSEAAAKGSSGGVQEISDSRPMLHIYLNGRRFLGLLDTGADKTCIAGRDWPANWPIHQTESSLQGLGMACGVARSSQPLRWQHEDKSGIIHPFVIPTLPFTLWGRDIMKDIKVRLMTDSPDDSQDLMIGAIESNLFADQISWKSDQPVWLNQWPLKQEKLQALQQLVTEQLQLGHLEESNSPWNTPVFVIKKKSGKWRLLQDLRAVNATMHDMGALQPGLPSPVAVPKGWEIIIIDLQDCFFNIKLHPEDCKRFAFSVPSPNFKRPYQRFQWKVLPQGMKNSPTLCQKFVDKAILTVRDKYQDSYIVHYMDDILLAHPSRSIVDEILTSMIQALNKHGLVVSTEKIQKYDNLKYLGTHIQGDSVSYQKLQIRTDKLRTLNDFQKLLGNINWIRPFLKLTTGELKPLFEILNGDSNPISTRKLTPEACKALQLMNERLSTARVKRLDLSQPWSLCILKTEYTPTACLWQDGVVEWIHLPHISPKVITPYDIFCTQLIIKGRHRSKELFSKDPDYIVVPYTKVQFDLLLQEKEDWPISLLGFLGEVHFHLPKDPLLTFTLQTAIIFPHMTSTTPLEKGIVIFTDGSANGRSVTYIQGREPIIKENTQNTAQQAEIVAVITAFEEVSQPFNLYTDSKYVTGLFPEIETATLSPRTKIYTELKHLQRLIHKRQEKFYIGHIRGHTGLPGPLAQGNAYADSLTRILTAAGKRTADGSEFEKRTADGSEFESPKKKAKVE

SEQ ID NO: 3159 - protein, 2114 aa, synthetic construct
  source 1..2114: note = Description of Artificial Sequence: Synthetic polypeptide
MPAAKRVKLDGGDKKYSIGLDIGTNSVGWAVITDEYKVPSKKFKVLGNTDRHSIKKNLIGALLFDSGETAEATRLKRTARRRYTRRKNRICYLQEIFSNEMAKVDDSFFHRLEESFLVEEDKKHERHPIFGNIVDEVAYHEKYPTIYHLRKKLVDSTDKADLRLIYLALAHMIKFRGHFLIEGDLNPDNSDVDKLFIQLVQTYNQLFEENPINASGVDAKAILSARLSKSRRLENLIAQLPGEKKNGLFGNLIALSLGLTPNFKSNFDLAEDAKLQLSKDTYDDDLDNLLAQIGDQYADLFLAAKNLSDAILLSDILRVNTEITKAPLSASMIKRYDEHHQDLTLLKALVRQQLPEKYKEIFFDQSKNGYAGYIDGGASQEEFYKFIKPILEKMDGTEELLVKLNREDLLRKQRTFDNGSIPHQIHLGELHAILRRQEDFYPFLKDNREKIEKILTFRIPYYVGPLARGNSRFAWMTRKSEETITPWNFEEVVDKGASAQSFIERMTNFDKNLPNEKVLPKHSLLYEYFTVYNELTKVKYVTEGMRKPAFLSGEQKKAIVDLLFKTNRKVTVKQLKEDYFKKIECFDSVEISGVEDRFNASLGTYHDLLKIIKDKDFLDNEENEDILEDIVLTLTLFEDREMIEERLKTYAHLFDDKVMKQLKRRRYTGWGRLSRKLINGIRDKQSGKTILDFLKSDGFANRNFMQLIHDDSLTFKEDIQKAQVSGQGDSLHEHIANLAGSPAIKKGILQTVKVVDELVKVMGRHKPENIVIEMARENQTTQKGQKNSRERMKRIEEGIKELGSQILKEHPVENTQLQNEKLYLYYLQNGRDMYVDQELDINRLSDYDVDHIVPQSFLKDDSIDNKVLTRSDKARGKSDNVPSEEVVKKMKNYWRQLLNAKLITQRKFDNLTKAERGGLSELDKAGFIKRQLVETRQITKHVAQILDSRMNTKYDENDKLIREVKVITLKSKLVSDFRKDFQFYKVREINNYHHAHDAYLNAVVGTALIKKYPKLESEFVYGDYKVYDVRKMIAKSEQEIGKATAKYFFYSNIMNFFKTEITLANGEIRKRPLIETNGETGEIVWDKGRDFATVRKVLSMPQVNIVKKTEVQTGGFSKESILPKRNSDKLIARKKDWDPKKYGGFDSPTVAYSVLVVAKVEKGKSKKLKSVKELLGITIMERSSFEKNPIDFLEAKGYKEVKKDLIIKLPKYSLFELENGRKRMLASAGELQKGNELALPSKYVNFLYLASHYEKLKGSPEDNEQKQLFVEQHKHYLDEIIEQISEFSKRVILADANLDKVLSAYNKHRDKPIREQAENIIHLFTLTNLGAPAAFKYFDTTIDRKRYTSTKEVLDATLIHQSITGLYETRIDLSQLGGDGGGGGGSSGGSGGVQEISDSRPMLHIYLNGRRFLGLLDTGADKTCIAGRDWPANWPIHQTESSLQGLGMACGVARSSQPLRWQHEDKSGIIHPFVIPTLPFTLWGRDIMKDIKVRLMTDSPDDSQDLMIGAIESNLFADQISWKSDQPVWLNQWPLKQEKLQALQQLVTEQLQLGHLEESNSPWNTPVFVIKKKSGKWRLLQDLRAVNATMHDMGALQPGLPSPVAVPKGWEIIIIDLQDCFFNIKLHPEDCKRFAFSVPSPNFKRPYQRFQWKVLPQGMKNSPTLCQKFVDKAILTVRDKYQDSYIVHYMDDILLAHPSRSIVDEILTSMIQALNKHGLVVSTEKIQKYDNLKYLGTHIQGDSVSYQKLQIRTDKLRTLNDFQKLLGNINWIRPFLKLTTGELKPLFEILNGDSNPISTRKLTPEACKALQLMNERLSTARVKRLDLSQPWSLCILKTEYTPTACLWQDGVVEWIHLPHISPKVITPYDIFCTQLIIKGRHRSKELFSKDPDYIVVPYTKVQFDLLLQEKEDWPISLLGFLGEVHFHLPKDPLLTFTLQTAIIFPHMTSTTPLEKGIVIFTDGSANGRSVTYIQGREPIIKENTQNTAQQAEIVAVITAFEEVSQPFNLYTDSKYVTGLFPEIETATLSPRTKIYTELKHLQRLIHKRQEKFYIGHIRGHTGLPGPLAQGNAYADSLTRILTAAGKRTADGSEFEKRTADGSEFESPKKKAKVE

SEQ ID NO: 3160 - protein, 2111 aa, synthetic construct
  source 1..2111: note = Description of Artificial Sequence: Synthetic polypeptide
MPAAKRVKLDGGDKKYSIGLDIGTNSVGWAVITDEYKVPSKKFKVLGNTDRHSIKKNLIGALLFDSGETAEATRLKRTARRRYTRRKNRICYLQEIFSNEMAKVDDSFFHRLEESFLVEEDKKHERHPIFGNIVDEVAYHEKYPTIYHLRKKLVDSTDKADLRLIYLALAHMIKFRGHFLIEGDLNPDNSDVDKLFIQLVQTYNQLFEENPINASGVDAKAILSARLSKSRRLENLIAQLPGEKKNGLFGNLIALSLGLTPNFKSNFDLAEDAKLQLSKDTYDDDLDNLLAQIGDQYADLFLAAKNLSDAILLSDILRVNTEITKAPLSASMIKRYDEHHQDLTLLKALVRQQLPEKYKEIFFDQSKNGYAGYIDGGASQEEFYKFIKPILEKMDGTEELLVKLNREDLLRKQRTFDNGSIPHQIHLGELHAILRRQEDFYPFLKDNREKIEKILTFRIPYYVGPLARGNSRFAWMTRKSEETITPWNFEEVVDKGASAQSFIERMTNFDKNLPNEKVLPKHSLLYEYFTVYNELTKVKYVTEGMRKPAFLSGEQKKAIVDLLFKTNRKVTVKQLKEDYFKKIECFDSVEISGVEDRFNASLGTYHDLLKIIKDKDFLDNEENEDILEDIVLTLTLFEDREMIEERLKTYAHLFDDKVMKQLKRRRYTGWGRLSRKLINGIRDKQSGKTILDFLKSDGFANRNFMQLIHDDSLTFKEDIQKAQVSGQGDSLHEHIANLAGSPAIKKGILQTVKVVDELVKVMGRHKPENIVIEMARENQTTQKGQKNSRERMKRIEEGIKELGSQILKEHPVENTQLQNEKLYLYYLQNGRDMYVDQELDINRLSDYDVDHIVPQSFLKDDSIDNKVLTRSDKARGKSDNVPSEEVVKKMKNYWRQLLNAKLITQRKFDNLTKAERGGLSELDKAGFIKRQLVETRQITKHVAQILDSRMNTKYDENDKLIREVKVITLKSKLVSDFRKDFQFYKVREINNYHHAHDAYLNAVVGTALIKKYPKLESEFVYGDYKVYDVRKMIAKSEQEIGKATAKYFFYSNIMNFFKTEITLANGEIRKRPLIETNGETGEIVWDKGRDFATVRKVLSMPQVNIVKKTEVQTGGFSKESILPKRNSDKLIARKKDWDPKKYGGFDSPTVAYSVLVVAKVEKGKSKKLKSVKELLGITIMERSSFEKNPIDFLEAKGYKEVKKDLIIKLPKYSLFELENGRKRMLASAGELQKGNELALPSKYVNFLYLASHYEKLKGSPEDNEQKQLFVEQHKHYLDEIIEQISEFSKRVILADANLDKVLSAYNKHRDKPIREQAENIIHLFTLTNLGAPAAFKYFDTTIDRKRYTSTKEVLDATLIHQSITGLYETRIDLSQLGGDGGGGSPAPGGVQEISDSRPMLHIYLNGRRFLGLLDTGADKTCIAGRDWPANWPIHQTESSLQGLGMACGVARSSQPLRWQHEDKSGIIHPFVIPTLPFTLWGRDIMKDIKVRLMTDSPDDSQDLMIGAIESNLFADQISWKSDQPVWLNQWPLKQEKLQALQQLVTEQLQLGHLEESNSPWNTPVFVIKKKSGKWRLLQDLRAVNATMHDMGALQPGLPSPVAVPKGWEIIIIDLQDCFFNIKLHPEDCKRFAFSVPSPNFKRPYQRFQWKVLPQGMKNSPTLCQKFVDKAILTVRDKYQDSYIVHYMDDILLAHPSRSIVDEILTSMIQALNKHGLVVSTEKIQKYDNLKYLGTHIQGDSVSYQKLQIRTDKLRTLNDFQKLLGNINWIRPFLKLTTGELKPLFEILNGDSNPISTRKLTPEACKALQLMNERLSTARVKRLDLSQPWSLCILKTEYTPTACLWQDGVVEWIHLPHISPKVITPYDIFCTQLIIKGRHRSKELFSKDPDYIVVPYTKVQFDLLLQEKEDWPISLLGFLGEVHFHLPKDPLLTFTLQTAIIFPHMTSTTPLEKGIVIFTDGSANGRSVTYIQGREPIIKENTQNTAQQAEIVAVITAFEEVSQPFNLYTDSKYVTGLFPEIETATLSPRTKIYTELKHLQRLIHKRQEKFYIGHIRGHTGLPGPLAQGNAYADSLTRILTAAGKRTADGSEFEKRTADGSEFESPKKKAKVE

SEQ ID NO: 3161 - protein, 2114 aa, synthetic construct
  source 1..2114: note = Description of Artificial Sequence: Synthetic polypeptide
MPAAKRVKLDGGDKKYSIGLDIGTNSVGWAVITDEYKVPSKKFKVLGNTDRHSIKKNLIGALLFDSGETAEATRLKRTARRRYTRRKNRICYLQEIFSNEMAKVDDSFFHRLEESFLVEEDKKHERHPIFGNIVDEVAYHEKYPTIYHLRKKLVDSTDKADLRLIYLALAHMIKFRGHFLIEGDLNPDNSDVDKLFIQLVQTYNQLFEENPINASGVDAKAILSARLSKSRRLENLIAQLPGEKKNGLFGNLIALSLGLTPNFKSNFDLAEDAKLQLSKDTYDDDLDNLLAQIGDQYADLFLAAKNLSDAILLSDILRVNTEITKAPLSASMIKRYDEHHQDLTLLKALVRQQLPEKYKEIFFDQSKNGYAGYIDGGASQEEFYKFIKPILEKMDGTEELLVKLNREDLLRKQRTFDNGSIPHQIHLGELHAILRRQEDFYPFLKDNREKIEKILTFRIPYYVGPLARGNSRFAWMTRKSEETITPWNFEEVVDKGASAQSFIERMTNFDKNLPNEKVLPKHSLLYEYFTVYNELTKVKYVTEGMRKPAFLSGEQKKAIVDLLFKTNRKVTVKQLKEDYFKKIECFDSVEISGVEDRFNASLGTYHDLLKIIKDKDFLDNEENEDILEDIVLTLTLFEDREMIEERLKTYAHLFDDKVMKQLKRRRYTGWGRLSRKLINGIRDKQSGKTILDFLKSDGFANRNFMQLIHDDSLTFKEDIQKAQVSGQGDSLHEHIANLAGSPAIKKGILQTVKVVDELVKVMGRHKPENIVIEMARENQTTQKGQKNSRERMKRIEEGIKELGSQILKEHPVENTQLQNEKLYLYYLQNGRDMYVDQELDINRLSDYDVDHIVPQSFLKDDSIDNKVLTRSDKARGKSDNVPSEEVVKKMKNYWRQLLNAKLITQRKFDNLTKAERGGLSELDKAGFIKRQLVETRQITKHVAQILDSRMNTKYDENDKLIREVKVITLKSKLVSDFRKDFQFYKVREINNYHHAHDAYLNAVVGTALIKKYPKLESEFVYGDYKVYDVRKMIAKSEQEIGKATAKYFFYSNIMNFFKTEITLANGEIRKRPLIETNGETGEIVWDKGRDFATVRKVLSMPQVNIVKKTEVQTGGFSKESILPKRNSDKLIARKKDWDPKKYGGFDSPTVAYSVLVVAKVEKGKSKKLKSVKELLGITIMERSSFEKNPIDFLEAKGYKEVKKDLIIKLPKYSLFELENGRKRMLASAGELQKGNELALPSKYVNFLYLASHYEKLKGSPEDNEQKQLFVEQHKHYLDEIIEQISEFSKRVILADANLDKVLSAYNKHRDKPIREQAENIIHLFTLTNLGAPAAFKYFDTTIDRKRYTSTKEVLDATLIHQSITGLYETRIDLSQLGGDGGPAPGSSGGSGGVQEISDSRPMLHIYLNGRRFLGLLDTGADKTCIAGRDWPANWPIHQTESSLQGLGMACGVARSSQPLRWQHEDKSGIIHPFVIPTLPFTLWGRDIMKDIKVRLMTDSPDDSQDLMIGAIESNLFADQISWKSDQPVWLNQWPLKQEKLQALQQLVTEQLQLGHLEESNSPWNTPVFVIKKKSGKWRLLQDLRAVNATMHDMGALQPGLPSPVAVPKGWEIIIIDLQDCFFNIKLHPEDCKRFAFSVPSPNFKRPYQRFQWKVLPQGMKNSPTLCQKFVDKAILTVRDKYQDSYIVHYMDDILLAHPSRSIVDEILTSMIQALNKHGLVVSTEKIQKYDNLKYLGTHIQGDSVSYQKLQIRTDKLRTLNDFQKLLGNINWIRPFLKLTTGELKPLFEILNGDSNPISTRKLTPEACKALQLMNERLSTARVKRLDLSQPWSLCILKTEYTPTACLWQDGVVEWIHLPHISPKVITPYDIFCTQLIIKGRHRSKELFSKDPDYIVVPYTKVQFDLLLQEKEDWPISLLGFLGEVHFHLPKDPLLTFTLQTAIIFPHMTSTTPLEKGIVIFTDGSANGRSVTYIQGREPIIKENTQNTAQQAEIVAVITAFEEVSQPFNLYTDSKYVTGLFPEIETATLSPRTKIYTELKHLQRLIHKRQEKFYIGHIRGHTGLPGPLAQGNAYADSLTRILTAAGKRTADGSEFEKRTADGSEFESPKKKAKVE

SEQ ID NO: 3162 - protein, 2116 aa, synthetic construct
  source 1..2116: note = Description of Artificial Sequence: Synthetic polypeptide
MPAAKRVKLDGGDKKYSIGLDIGTNSVGWAVITDEYKVPSKKFKVLGNTDRHSIKKNLIGALLFDSGETAEATRLKRTARRRYTRRKNRICYLQEIFSNEMAKVDDSFFHRLEESFLVEEDKKHERHPIFGNIVDEVAYHEKYPTIYHLRKKLVDSTDKADLRLIYLALAHMIKFRGHFLIEGDLNPDNSDVDKLFIQLVQTYNQLFEENPINASGVDAKAILSARLSKSRRLENLIAQLPGEKKNGLFGNLIALSLGLTPNFKSNFDLAEDAKLQLSKDTYDDDLDNLLAQIGDQYADLFLAAKNLSDAILLSDILRVNTEITKAPLSASMIKRYDEHHQDLTLLKALVRQQLPEKYKEIFFDQSKNGYAGYIDGGASQEEFYKFIKPILEKMDGTEELLVKLNREDLLRKQRTFDNGSIPHQIHLGELHAILRRQEDFYPFLKDNREKIEKILTFRIPYYVGPLARGNSRFAWMTRKSEETITPWNFEEVVDKGASAQSFIERMTNFDKNLPNEKVLPKHSLLYEYFTVYNELTKVKYVTEGMRKPAFLSGEQKKAIVDLLFKTNRKVTVKQLKEDYFKKIECFDSVEISGVEDRFNASLGTYHDLLKIIKDKDFLDNEENEDILEDIVLTLTLFEDREMIEERLKTYAHLFDDKVMKQLKRRRYTGWGRLSRKLINGIRDKQSGKTILDFLKSDGFANRNFMQLIHDDSLTFKEDIQKAQVSGQGDSLHEHIANLAGSPAIKKGILQTVKVVDELVKVMGRHKPENIVIEMARENQTTQKGQKNSRERMKRIEEGIKELGSQILKEHPVENTQLQNEKLYLYYLQNGRDMYVDQELDINRLSDYDVDHIVPQSFLKDDSIDNKVLTRSDKARGKSDNVPSEEVVKKMKNYWRQLLNAKLITQRKFDNLTKAERGGLSELDKAGFIKRQLVETRQITKHVAQILDSRMNTKYDENDKLIREVKVITLKSKLVSDFRKDFQFYKVREINNYHHAHDAYLNAVVGTALIKKYPKLESEFVYGDYKVYDVRKMIAKSEQEIGKATAKYFFYSNIMNFFKTEITLANGEIRKRPLIETNGETGEIVWDKGRDFATVRKVLSMPQVNIVKKTEVQTGGFSKESILPKRNSDKLIARKKDWDPKKYGGFDSPTVAYSVLVVAKVEKGKSKKLKSVKELLGITIMERSSFEKNPIDFLEAKGYKEVKKDLIIKLPKYSLFELENGRKRMLASAGELQKGNELALPSKYVNFLYLASHYEKLKGSPEDNEQKQLFVEQHKHYLDEIIEQISEFSKRVILADANLDKVLSAYNKHRDKPIREQAENIIHLFTLTNLGAPAAFKYFDTTIDRKRYTSTKEVLDATLIHQSITGLYETRIDLSQLGGDGGGGSGGGEAAAKGGVQEISDSRPMLHIYLNGRRFLGLLDTGADKTCIAGRDWPANWPIHQTESSLQGLGMACGVARSSQPLRWQHEDKSGIIHPFVIPTLPFTLWGRDIMKDIKVRLMTDSPDDSQDLMIGAIESNLFADQISWKSDQPVWLNQWPLKQEKLQALQQLVTEQLQLGHLEESNSPWNTPVFVIKKKSGKWRLLQDLRAVNATMHDMGALQPGLPSPVAVPKGWEIIIIDLQDCFFNIKLHPEDCKRFAFSVPSPNFKRPYQRFQWKVLPQGMKNSPTLCQKFVDKAILTVRDKYQDSYIVHYMDDILLAHPSRSIVDEILTSMIQALNKHGLVVSTEKIQKYDNLKYLGTHIQGDSVSYQKLQIRTDKLRTLNDFQKLLGNINWIRPFLKLTTGELKPLFEILNGDSNPISTRKLTPEACKALQLMNERLSTARVKRLDLSQPWSLCILKTEYTPTACLWQDGVVEWIHLPHISPKVITPYDIFCTQLIIKGRHRSKELFSKDPDYIVVPYTKVQFDLLLQEKEDWPISLLGFLGEVHFHLPKDPLLTFTLQTAIIFPHMTSTTPLEKGIVIFTDGSANGRSVTYIQGREPIIKENTQNTAQQAEIVAVITAFEEVSQPFNLYTDSKYVTGLFPEIETATLSPRTKIYTELKHLQRLIHKRQEKFYIGHIRGHTGLPGPLAQGNAYADSLTRILTAAGKRTADGSEFEKRTADGSEFESPKKKAKVE

SEQ ID NO: 3163 - protein, 2116 aa, synthetic construct
  source 1..2116: note = Description of Artificial Sequence: Synthetic polypeptide
MPAAKRVKLDGGDKKYSIGLDIGTNSVGWAVITDEYKVPSKKFKVLGNTDRHSIKKNLIGALLFDSGETAEATRLKRTARRRYTRRKNRICYLQEIFSNEMAKVDDSFFHRLEESFLVEEDKKHERHPIFGNIVDEVAYHEKYPTIYHLRKKLVDSTDKADLRLIYLALAHMIKFRGHFLIEGDLNPDNSDVDKLFIQLVQTYNQLFEENPINASGVDAKAILSARLSKSRRLENLIAQLPGEKKNGLFGNLIALSLGLTPNFKSNFDLAEDAKLQLSKDTYDDDLDNLLAQIGDQYADLFLAAKNLSDAILLSDILRVNTEITKAPLSASMIKRYDEHHQDLTLLKALVRQQLPEKYKEIFFDQSKNGYAGYIDGGASQEEFYKFIKPILEKMDGTEELLVKLNREDLLRKQRTFDNGSIPHQIHLGELHAILRRQEDFYPFLKDNREKIEKILTFRIPYYVGPLARGNSRFAWMTRKSEETITPWNFEEVVDKGASAQSFIERMTNFDKNLPNEKVLPKHSLLYEYFTVYNELTKVKYVTEGMRKPAFLSGEQKKAIVDLLFKTNRKVTVKQLKEDYFKKIECFDSVEISGVEDRFNASLGTYHDLLKIIKDKDFLDNEENEDILEDIVLTLTLFEDREMIEERLKTYAHLFDDKVMKQLKRRRYTGWGRLSRKLINGIRDKQSGKTILDFLKSDGFANRNFMQLIHDDSLTFKEDIQKAQVSGQGDSLHEHIANLAGSPAIKKGILQTVKVVDELVKVMGRHKPENIVIEMARENQTTQKGQKNSRERMKRIEEGIKELGSQILKEHPVENTQLQNEKLYLYYLQNGRDMYVDQELDINRLSDYDVDHIVPQSFLKDDSIDNKVLTRSDKARGKSDNVPSEEVVKKMKNYWRQLLNAKLITQRKFDNLTKAERGGLSELDKAGFIKRQLVETRQITKHVAQILDSRMNTKYDENDKLIREVKVITLKSKLVSDFRKDFQFYKVREINNYHHAHDAYLNAVVGTALIKKYPKLESEFVYGDYKVYDVRKMIAKSEQEIGKATAKYFFYSNIMNFFKTEITLANGEIRKRPLIETNGETGEIVWDKGRDFATVRKVLSMPQVNIVKKTEVQTGGFSKESILPKRNSDKLIARKKDWDPKKYGGFDSPTVAYSVLVVAKVEKGKSKKLKSVKELLGITIMERSSFEKNPIDFLEAKGYKEVKKDLIIKLPKYSLFELENGRKRMLASAGELQKGNELALPSKYVNFLYLASHYEKLKGSPEDNEQKQLFVEQHKHYLDEIIEQISEFSKRVILADANLDKVLSAYNKHRDKPIREQAENIIHLFTLTNLGAPAAFKYFDTTIDRKRYTSTKEVLDATLIHQSITGLYETRIDLSQLGGDGGGGGGSSEAAAKGGVQEISDSRPMLHIYLNGRRFLGLLDTGADKTCIAGRDWPANWPIHQTESSLQGLGMACGVARSSQPLRWQHEDKSGIIHPFVIPTLPFTLWGRDIMKDIKVRLMTDSPDDSQDLMIGAIESNLFADQISWKSDQPVWLNQWPLKQEKLQALQQLVTEQLQLGHLEESNSPWNTPVFVIKKKSGKWRLLQDLRAVNATMHDMGALQPGLPSPVAVPKGWEIIIIDLQDCFFNIKLHPEDCKRFAFSVPSPNFKRPYQRFQWKVLPQGMKNSPTLCQKFVDKAILTVRDKYQDSYIVHYMDDILLAHPSRSIVDEILTSMIQALNKHGLVVSTEKIQKYDNLKYLGTHIQGDSVSYQKLQIRTDKLRTLNDFQKLLGNINWIRPFLKLTTGELKPLFEILNGDSNPISTRKLTPEACKALQLMNERLSTARVKRLDLSQPWSLCILKTEYTPTACLWQDGVVEWIHLPHISPKVITPYDIFCTQLIIKGRHRSKELFSKDPDYIVVPYTKVQFDLLLQEKEDWPISLLGFLGEVHFHLPKDPLLTFTLQTAIIFPHMTSTTPLEKGIVIFTDGSANGRSVTYIQGREPIIKENTQNTAQQAEIVAVITAFEEVSQPFNLYTDSKYVTGLFPEIETATLSPRTKIYTELKHLQRLIHKRQEKFYIGHIRGHTGLPGPLAQGNAYADSLTRILTAAGKRTADGSEFEKRTADGSEFESPKKKAKVE

SEQ ID NO: 3164 - protein, 2116 aa, synthetic construct
  source 1..2116: note = Description of Artificial Sequence: Synthetic polypeptide
MPAAKRVKLDGGDKKYSIGLDIGTNSVGWAVITDEYKVPSKKFKVLGNTDRHSIKKNLIGALLFDSGETAEATRLKRTARRRYTRRKNRICYLQEIFSNEMAKVDDSFFHRLEESFLVEEDKKHERHPIFGNIVDEVAYHEKYPTIYHLRKKLVDSTDKADLRLIYLALAHMIKFRGHFLIEGDLNPDNSDVDKLFIQLVQTYNQLFEENPINASGVDAKAILSARLSKSRRLENLIAQLPGEKKNGLFGNLIALSLGLTPNFKSNFDLAEDAKLQLSKDTYDDDLDNLLAQIGDQYADLFLAAKNLSDAILLSDILRVNTEITKAPLSASMIKRYDEHHQDLTLLKALVRQQLPEKYKEIFFDQSKNGYAGYIDGGASQEEFYKFIKPILEKMDGTEELLVKLNREDLLRKQRTFDNGSIPHQIHLGELHAILRRQEDFYPFLKDNREKIEKILTFRIPYYVGPLARGNSRFAWMTRKSEETITPWNFEEVVDKGASAQSFIERMTNFDKNLPNEKVLPKHSLLYEYFTVYNELTKVKYVTEGMRKPAFLSGEQKKAIVDLLFKTNRKVTVKQLKEDYFKKIECFDSVEISGVEDRFNASLGTYHDLLKIIKDKDFLDNEENEDILEDIVLTLTLFEDREMIEERLKTYAHLFDDKVMKQLKRRRYTGWGRLSRKLINGIRDKQSGKTILDFLKSDGFANRNFMQLIHDDSLTFKEDIQKAQVSGQGDSLHEHIANLAGSPAIKKGILQTVKVVDELVKVMGRHKPENIVIEMARENQTTQKGQKNSRERMKRIEEGIKELGSQILKEHPVENTQLQNEKLYLYYLQNGRDMYVDQELDINRLSDYDVDHIVPQSFLKDDSIDNKVLTRSDKARGKSDNVPSEEVVKKMKNYWRQLLNAKLITQRKFDNLTKAERGGLSELDKAGFIKRQLVETRQITKHVAQILDSRMNTKYDENDKLIREVKVITLKSKLVSDFRKDFQFYKVREINNYHHAHDAYLNAVVGTALIKKYPKLESEFVYGDYKVYDVRKMIAKSEQEIGKATAKYFFYSNIMNFFKTEITLANGEIRKRPLIETNGETGEIVWDKGRDFATVRKVLSMPQVNIVKKTEVQTGGFSKESILPKRNSDKLIARKKDWDPKKYGGFDSPTVAYSVLVVAKVEKGKSKKLKSVKELLGITIMERSSFEKNPIDFLEAKGYKEVKKDLIIKLPKYSLFELENGRKRMLASAGELQKGNELALPSKYVNFLYLASHYEKLKGSPEDNEQKQLFVEQHKHYLDEIIEQISEFSKRVILADANLDKVLSAYNKHRDKPIREQAENIIHLFTLTNLGAPAAFKYFDTTIDRKRYTSTKEVLDATLIHQSITGLYETRIDLSQLGGDGGGGSPAPEAAAKGGVQEISDSRPMLHIYLNGRRFLGLLDTGADKTCIAGRDWPANWPIHQTESSLQGLGMACGVARSSQPLRWQHEDKSGIIHPFVIPTLPFTLWGRDIMKDIKVRLMTDSPDDSQDLMIGAIESNLFADQISWKSDQPVWLNQWPLKQEKLQALQQLVTEQLQLGHLEESNSPWNTPVFVIKKKSGKWRLLQDLRAVNATMHDMGALQPGLPSPVAVPKGWEIIIIDLQDCFFNIKLHPEDCKRFAFSVPSPNFKRPYQRFQWKVLPQGMKNSPTLCQKFVDKAILTVRDKYQDSYIVHYMDDILLAHPSRSIVDEILTSMIQALNKHGLVVSTEKIQKYDNLKYLGTHIQGDSVSYQKLQIRTDKLRTLNDFQKLLGNINWIRPFLKLTTGELKPLFEILNGDSNPISTRKLTPEACKALQLMNERLSTARVKRLDLSQPWSLCILKTEYTPTACLWQDGVVEWIHLPHISPKVITPYDIFCTQLIIKGRHRSKELFSKDPDYIVVPYTKVQFDLLLQEKEDWPISLLGFLGEVHFHLPKDPLLTFTLQTAIIFPHMTSTTPLEKGIVIFTDGSANGRSVTYIQGREPIIKENTQNTAQQAEIVAVITAFEEVSQPFNLYTDSKYVTGLFPEIETATLSPRTKIYTELKHLQRLIHKRQEKFYIGHIRGHTGLPGPLAQGNAYADSLTRILTAAGKRTADGSEFEKRTADGSEFESPKKKAKVE

SEQ ID NO: 3165 - protein, 2117 aa, synthetic construct
  source 1..2117: note = Description of Artificial Sequence: Synthetic polypeptide
MPAAKRVKLDGGDKKYSIGLDIGTNSVGWAVITDEYKVPSKKFKVLGNTDRHSIKKNLIGALLFDSGETAEATRLKRTARRRYTRRKNRICYLQEIFSNEMAKVDDSFFHRLEESFLVEEDKKHERHPIFGNIVDEVAYHEKYPTIYHLRKKLVDSTDKADLRLIYLALAHMIKFRGHFLIEGDLNPDNSDVDKLFIQLVQTYNQLFEENPINASGVDAKAILSARLSKSRRLENLIAQLPGEKKNGLFGNLIALSLGLTPNFKSNFDLAEDAKLQLSKDTYDDDLDNLLAQIGDQYADLFLAAKNLSDAILLSDILRVNTEITKAPLSASMIKRYDEHHQDLTLLKALVRQQLPEKYKEIFFDQSKNGYAGYIDGGASQEEFYKFIKPILEKMDGTEELLVKLNREDLLRKQRTFDNGSIPHQIHLGELHAILRRQEDFYPFLKDNREKIEKILTFRIPYYVGPLARGNSRFAWMTRKSEETITPWNFEEVVDKGASAQSFIERMTNFDKNLPNEKVLPKHSLLYEYFTVYNELTKVKYVTEGMRKPAFLSGEQKKAIVDLLFKTNRKVTVKQLKEDYFKKIECFDSVEISGVEDRFNASLGTYHDLLKIIKDKDFLDNEENEDILEDIVLTLTLFEDREMIEERLKTYAHLFDDKVMKQLKRRRYTGWGRLSRKLINGIRDKQSGKTILDFLKSDGFANRNFMQLIHDDSLTFKEDIQKAQVSGQGDSLHEHIANLAGSPAIKKGILQTVKVVDELVKVMGRHKPENIVIEMARENQTTQKGQKNSRERMKRIEEGIKELGSQILKEHPVENTQLQNEKLYLYYLQNGRDMYVDQELDINRLSDYDVDHIVPQSFLKDDSIDNKVLTRSDKARGKSDNVPSEEVVKKMKNYWRQLLNAKLITQRKFDNLTKAERGGLSELDKAGFIKRQLVETRQITKHVAQILDSRMNTKYDENDKLIREVKVITLKSKLVSDFRKDFQFYKVREINNYHHAHDAYLNAVVGTALIKKYPKLESEFVYGDYKVYDVRKMIAKSEQEIGKATAKYFFYSNIMNFFKTEITLANGEIRKRPLIETNGETGEIVWDKGRDFATVRKVLSMPQVNIVKKTEVQTGGFSKESILPKRNSDKLIARKKDWDPKKYGGFDSPTVAYSVLVVAKVEKGKSKKLKSVKELLGITIMERSSFEKNPIDFLEAKGYKEVKKDLIIKLPKYSLFELENGRKRMLASAGELQKGNELALPSKYVNFLYLASHYEKLKGSPEDNEQKQLFVEQHKHYLDEIIEQISEFSKRVILADANLDKVLSAYNKHRDKPIREQAENIIHLFTLTNLGAPAAFKYFDTTIDRKRYTSTKEVLDATLIHQSITGLYETRIDLSQLGGDGGGSAGSAAGSGEFGGVQEISDSRPMLHIYLNGRRFLGLLDTGADKTCIAGRDWPANWPIHQTESSLQGLGMACGVARSSQPLRWQHEDKSGIIHPFVIPTLPFTLWGRDIMKDIKVRLMTDSPDDSQDLMIGAIESNLFADQISWKSDQPVWLNQWPLKQEKLQALQQLVTEQLQLGHLEESNSPWNTPVFVIKKKSGKWRLLQDLRAVNATMHDMGALQPGLPSPVAVPKGWEIIIIDLQDCFFNIKLHPEDCKRFAFSVPSPNFKRPYQRFQWKVLPQGMKNSPTLCQKFVDKAILTVRDKYQDSYIVHYMDDILLAHPSRSIVDEILTSMIQALNKHGLVVSTEKIQKYDNLKYLGTHIQGDSVSYQKLQIRTDKLRTLNDFQKLLGNINWIRPFLKLTTGELKPLFEILNGDSNPISTRKLTPEACKALQLMNERLSTARVKRLDLSQPWSLCILKTEYTPTACLWQDGVVEWIHLPHISPKVITPYDIFCTQLIIKGRHRSKELFSKDPDYIVVPYTKVQFDLLLQEKEDWPISLLGFLGEVHFHLPKDPLLTFTLQTAIIFPHMTSTTPLEKGIVIFTDGSANGRSVTYIQGREPIIKENTQNTAQQAEIVAVITAFEEVSQPFNLYTDSKYVTGLFPEIETATLSPRTKIYTELKHLQRLIHKRQEKFYIGHIRGHTGLPGPLAQGNAYADSLTRILTAAGKRTADGSEFEKRTADGSEFESPKKKAKVE

SEQ ID NO: 3166 - protein, 2111 aa, synthetic construct
  source 1..2111: note = Description of Artificial Sequence: Synthetic polypeptide
MPAAKRVKLDGGDKKYSIGLDIGTNSVGWAVITDEYKVPSKKFKVLGNTDRHSIKKNLIGALLFDSGETAEATRLKRTARRRYTRRKNRICYLQEIFSNEMAKVDDSFFHRLEESFLVEEDKKHERHPIFGNIVDEVAYHEKYPTIYHLRKKLVDSTDKADLRLIYLALAHMIKFRGHFLIEGDLNPDNSDVDKLFIQLVQTYNQLFEENPINASGVDAKAILSARLSKSRRLENLIAQLPGEKKNGLFGNLIALSLGLTPNFKSNFDLAEDAKLQLSKDTYDDDLDNLLAQIGDQYADLFLAAKNLSDAILLSDILRVNTEITKAPLSASMIKRYDEHHQDLTLLKALVRQQLPEKYKEIFFDQSKNGYAGYIDGGASQEEFYKFIKPILEKMDGTEELLVKLNREDLLRKQRTFDNGSIPHQIHLGELHAILRRQEDFYPFLKDNREKIEKILTFRIPYYVGPLARGNSRFAWMTRKSEETITPWNFEEVVDKGASAQSFIERMTNFDKNLPNEKVLPKHSLLYEYFTVYNELTKVKYVTEGMRKPAFLSGEQKKAIVDLLFKTNRKVTVKQLKEDYFKKIECFDSVEISGVEDRFNASLGTYHDLLKIIKDKDFLDNEENEDILEDIVLTLTLFEDREMIEERLKTYAHLFDDKVMKQLKRRRYTGWGRLSRKLINGIRDKQSGKTILDFLKSDGFANRNFMQLIHDDSLTFKEDIQKAQVSGQGDSLHEHIANLAGSPAIKKGILQTVKVVDELVKVMGRHKPENIVIEMARENQTTQKGQKNSRERMKRIEEGIKELGSQILKEHPVENTQLQNEKLYLYYLQNGRDMYVDQELDINRLSDYDVDHIVPQSFLKDDSIDNKVLTRSDKARGKSDNVPSEEVVKKMKNYWRQLLNAKLITQRKFDNLTKAERGGLSELDKAGFIKRQLVETRQITKHVAQILDSRMNTKYDENDKLIREVKVITLKSKLVSDFRKDFQFYKVREINNYHHAHDAYLNAVVGTALIKKYPKLESEFVYGDYKVYDVRKMIAKSEQEIGKATAKYFFYSNIMNFFKTEITLANGEIRKRPLIETNGETGEIVWDKGRDFATVRKVLSMPQVNIVKKTEVQTGGFSKESILPKRNSDKLIARKKDWDPKKYGGFDSPTVAYSVLVVAKVEKGKSKKLKSVKELLGITIMERSSFEKNPIDFLEAKGYKEVKKDLIIKLPKYSLFELENGRKRMLASAGELQKGNELALPSKYVNFLYLASHYEKLKGSPEDNEQKQLFVEQHKHYLDEIIEQISEFSKRVILADANLDKVLSAYNKHRDKPIREQAENIIHLFTLTNLGAPAAFKYFDTTIDRKRYTSTKEVLDATLIHQSITGLYETRIDLSQLGGDGGGGGGGSGGVQEISDSRPMLHIYLNGRRFLGLLDTGADKTCIAGRDWPANWPIHQTESSLQGLGMACGVARSSQPLRWQHEDKSGIIHPFVIPTLPFTLWGRDIMKDIKVRLMTDSPDDSQDLMIGAIESNLFADQISWKSDQPVWLNQWPLKQEKLQALQQLVTEQLQLGHLEESNSPWNTPVFVIKKKSGKWRLLQDLRAVNATMHDMGALQPGLPSPVAVPKGWEIIIIDLQDCFFNIKLHPEDCKRFAFSVPSPNFKRPYQRFQWKVLPQGMKNSPTLCQKFVDKAILTVRDKYQDSYIVHYMDDILLAHPSRSIVDEILTSMIQALNKHGLVVSTEKIQKYDNLKYLGTHIQGDSVSYQKLQIRTDKLRTLNDFQKLLGNINWIRPFLKLTTGELKPLFEILNGDSNPISTRKLTPEACKALQLMNERLSTARVKRLDLSQPWSLCILKTEYTPTACLWQDGVVEWIHLPHISPKVITPYDIFCTQLIIKGRHRSKELFSKDPDYIVVPYTKVQFDLLLQEKEDWPISLLGFLGEVHFHLPKDPLLTFTLQTAIIFPHMTSTTPLEKGIVIFTDGSANGRSVTYIQGREPIIKENTQNTAQQAEIVAVITAFEEVSQPFNLYTDSKYVTGLFPEIETATLSPRTKIYTELKHLQRLIHKRQEKFYIGHIRGHTGLPGPLAQGNAYADSLTRILTAAGKRTADGSEFEKRTADGSEFESPKKKAKVE

SEQ ID NO: 3167 - protein, 2113 aa, synthetic construct
  source 1..2113: note = Description of Artificial Sequence: Synthetic polypeptide
MPAAKRVKLDGGDKKYSIGLDIGTNSVGWAVITDEYKVPSKKFKVLGNTDRHSIKKNLIGALLFDSGETAEATRLKRTARRRYTRRKNRICYLQEIFSNEMAKVDDSFFHRLEESFLVEEDKKHERHPIFGNIVDEVAYHEKYPTIYHLRKKLVDSTDKADLRLIYLALAHMIKFRGHFLIEGDLNPDNSDVDKLFIQLVQTYNQLFEENPINASGVDAKAILSARLSKSRRLENLIAQLPGEKKNGLFGNLIALSLGLTPNFKSNFDLAEDAKLQLSKDTYDDDLDNLLAQIGDQYADLFLAAKNLSDAILLSDILRVNTEITKAPLSASMIKRYDEHHQDLTLLKALVRQQLPEKYKEIFFDQSKNGYAGYIDGGASQEEFYKFIKPILEKMDGTEELLVKLNREDLLRKQRTFDNGSIPHQIHLGELHAILRRQEDFYPFLKDNREKIEKILTFRIPYYVGPLARGNSRFAWMTRKSEETITPWNFEEVVDKGASAQSFIERMTNFDKNLPNEKVLPKHSLLYEYFTVYNELTKVKYVTEGMRKPAFLSGEQKKAIVDLLFKTNRKVTVKQLKEDYFKKIECFDSVEISGVEDRFNASLGTYHDLLKIIKDKDFLDNEENEDILEDIVLTLTLFEDREMIEERLKTYAHLFDDKVMKQLKRRRYTGWGRLSRKLINGIRDKQSGKTILDFLKSDGFANRNFMQLIHDDSLTFKEDIQKAQVSGQGDSLHEHIANLAGSPAIKKGILQTVKVVDELVKVMGRHKPENIVIEMARENQTTQKGQKNSRERMKRIEEGIKELGSQILKEHPVENTQLQNEKLYLYYLQNGRDMYVDQELDINRLSDYDVDHIVPQSFLKDDSIDNKVLTRSDKARGKSDNVPSEEVVKKMKNYWRQLLNAKLITQRKFDNLTKAERGGLSELDKAGFIKRQLVETRQITKHVAQILDSRMNTKYDENDKLIREVKVITLKSKLVSDFRKDFQFYKVREINNYHHAHDAYLNAVVGTALIKKYPKLESEFVYGDYKVYDVRKMIAKSEQEIGKATAKYFFYSNIMNFFKTEITLANGEIRKRPLIETNGETGEIVWDKGRDFATVRKVLSMPQVNIVKKTEVQTGGFSKESILPKRNSDKLIARKKDWDPKKYGGFDSPTVAYSVLVVAKVEKGKSKKLKSVKELLGITIMERSSFEKNPIDFLEAKGYKEVKKDLIIKLPKYSLFELENGRKRMLASAGELQKGNELALPSKYVNFLYLASHYEKLKGSPEDNEQKQLFVEQHKHYLDEIIEQISEFSKRVILADANLDKVLSAYNKHRDKPIREQAENIIHLFTLTNLGAPAAFKYFDTTIDRKRYTSTKEVLDATLIHQSITGLYETRIDLSQLGGDGGGGGEAAAKGGVQEISDSRPMLHIYLNGRRFLGLLDTGADKTCIAGRDWPANWPIHQTESSLQGLGMACGVARSSQPLRWQHEDKSGIIHPFVIPTLPFTLWGRDIMKDIKVRLMTDSPDDSQDLMIGAIESNLFADQISWKSDQPVWLNQWPLKQEKLQALQQLVTEQLQLGHLEESNSPWNTPVFVIKKKSGKWRLLQDLRAVNATMHDMGALQPGLPSPVAVPKGWEIIIIDLQDCFFNIKLHPEDCKRFAFSVPSPNFKRPYQRFQWKVLPQGMKNSPTLCQKFVDKAILTVRDKYQDSYIVHYMDDILLAHPSRSIVDEILTSMIQALNKHGLVVSTEKIQKYDNLKYLGTHIQGDSVSYQKLQIRTDKLRTLNDFQKLLGNINWIRPFLKLTTGELKPLFEILNGDSNPISTRKLTPEACKALQLMNERLSTARVKRLDLSQPWSLCILKTEYTPTACLWQDGVVEWIHLPHISPKVITPYDIFCTQLIIKGRHRSKELFSKDPDYIVVPYTKVQFDLLLQEKEDWPISLLGFLGEVHFHLPKDPLLTFTLQTAIIFPHMTSTTPLEKGIVIFTDGSANGRSVTYIQGREPIIKENTQNTAQQAEIVAVITAFEEVSQPFNLYTDSKYVTGLFPEIETATLSPRTKIYTELKHLQRLIHKRQEKFYIGHIRGHTGLPGPLAQGNAYADSLTRILTAAGKRTADGSEFEKRTADGSEFESPKKKAKVE

SEQ ID NO: 3168 - protein, 2111 aa, synthetic construct
  source 1..2111: note = Description of Artificial Sequence: Synthetic polypeptide
MPAAKRVKLDGGDKKYSIGLDIGTNSVGWAVITDEYKVPSKKFKVLGNTDRHSIKKNLIGALLFDSGETAEATRLKRTARRRYTRRKNRICYLQEIFSNEMAKVDDSFFHRLEESFLVEEDKKHERHPIFGNIVDEVAYHEKYPTIYHLRKKLVDSTDKADLRLIYLALAHMIKFRGHFLIEGDLNPDNSDVDKLFIQLVQTYNQLFEENPINASGVDAKAILSARLSKSRRLENLIAQLPGEKKNGLFGNLIALSLGLTPNFKSNFDLAEDAKLQLSKDTYDDDLDNLLAQIGDQYADLFLAAKNLSDAILLSDILRVNTEITKAPLSASMIKRYDEHHQDLTLLKALVRQQLPEKYKEIFFDQSKNGYAGYIDGGASQEEFYKFIKPILEKMDGTEELLVKLNREDLLRKQRTFDNGSIPHQIHLGELHAILRRQEDFYPFLKDNREKIEKILTFRIPYYVGPLARGNSRFAWMTRKSEETITPWNFEEVVDKGASAQSFIERMTNFDKNLPNEKVLPKHSLLYEYFTVYNELTKVKYVTEGMRKPAFLSGEQKKAIVDLLFKTNRKVTVKQLKEDYFKKIECFDSVEISGVEDRFNASLGTYHDLLKIIKDKDFLDNEENEDILEDIVLTLTLFEDREMIEERLKTYAHLFDDKVMKQLKRRRYTGWGRLSRKLINGIRDKQSGKTILDFLKSDGFANRNFMQLIHDDSLTFKEDIQKAQVSGQGDSLHEHIANLAGSPAIKKGILQTVKVVDELVKVMGRHKPENIVIEMARENQTTQKGQKNSRERMKRIEEGIKELGSQILKEHPVENTQLQNEKLYLYYLQNGRDMYVDQELDINRLSDYDVDHIVPQSFLKDDSIDNKVLTRSDKARGKSDNVPSEEVVKKMKNYWRQLLNAKLITQRKFDNLTKAERGGLSELDKAGFIKRQLVETRQITKHVAQILDSRMNTKYDENDKLIREVKVITLKSKLVSDFRKDFQFYKVREINNYHHAHDAYLNAVVGTALIKKYPKLESEFVYGDYKVYDVRKMIAKSEQEIGKATAKYFFYSNIMNFFKTEITLANGEIRKRPLIETNGETGEIVWDKGRDFATVRKVLSMPQVNIVKKTEVQTGGFSKESILPKRNSDKLIARKKDWDPKKYGGFDSPTVAYSVLVVAKVEKGKSKKLKSVKELLGITIMERSSFEKNPIDFLEAKGYKEVKKDLIIKLPKYSLFELENGRKRMLASAGELQKGNELALPSKYVNFLYLASHYEKLKGSPEDNEQKQLFVEQHKHYLDEIIEQISEFSKRVILADANLDKVLSAYNKHRDKPIREQAENIIHLFTLTNLGAPAAFKYFDTTIDRKRYTSTKEVLDATLIHQSITGLYETRIDLSQLGGDGGGGSGGSGGVQEISDSRPMLHIYLNGRRFLGLLDTGADKTCIAGRDWPANWPIHQTESSLQGLGMACGVARSSQPLRWQHEDKSGIIHPFVIPTLPFTLWGRDIMKDIKVRLMTDSPDDSQDLMIGAIESNLFADQISWKSDQPVWLNQWPLKQEKLQALQQLVTEQLQLGHLEESNSPWNTPVFVIKKKSGKWRLLQDLRAVNATMHDMGALQPGLPSPVAVPKGWEIIIIDLQDCFFNIKLHPEDCKRFAFSVPSPNFKRPYQRFQWKVLPQGMKNSPTLCQKFVDKAILTVRDKYQDSYIVHYMDDILLAHPSRSIVDEILTSMIQALNKHGLVVSTEKIQKYDNLKYLGTHIQGDSVSYQKLQIRTDKLRTLNDFQKLLGNINWIRPFLKLTTGELKPLFEILNGDSNPISTRKLTPEACKALQLMNERLSTARVKRLDLSQPWSLCILKTEYTPTACLWQDGVVEWIHLPHISPKVITPYDIFCTQLIIKGRHRSKELFSKDPDYIVVPYTKVQFDLLLQEKEDWPISLLGFLGEVHFHLPKDPLLTFTLQTAIIFPHMTSTTPLEKGIVIFTDGSANGRSVTYIQGREPIIKENTQNTAQQAEIVAVITAFEEVSQPFNLYTDSKYVTGLFPEIETATLSPRTKIYTELKHLQRLIHKRQEKFYIGHIRGHTGLPGPLAQGNAYADSLTRILTAAGKRTADGSEFEKRTADGSEFESPKKKAKVE

SEQ ID NO: 3169 - protein, 2116 aa, synthetic construct
  source 1..2116: note = Description of Artificial Sequence: Synthetic polypeptide
MPAAKRVKLDGGDKKYSIGLDIGTNSVGWAVITDEYKVPSKKFKVLGNTDRHSIKKNLIGALLFDSGETAEATRLKRTARRRYTRRKNRICYLQEIFSNEMAKVDDSFFHRLEESFLVEEDKKHERHPIFGNIVDEVAYHEKYPTIYHLRKKLVDSTDKADLRLIYLALAHMIKFRGHFLIEGDLNPDNSDVDKLFIQLVQTYNQLFEENPINASGVDAKAILSARLSKSRRLENLIAQLPGEKKNGLFGNLIALSLGLTPNFKSNFDLAEDAKLQLSKDTYDDDLDNLLAQIGDQYADLFLAAKNLSDAILLSDILRVNTEITKAPLSASMIKRYDEHHQDLTLLKALVRQQLPEKYKEIFFDQSKNGYAGYIDGGASQEEFYKFIKPILEKMDGTEELLVKLNREDLLRKQRTFDNGSIPHQIHLGELHAILRRQEDFYPFLKDNREKIEKILTFRIPYYVGPLARGNSRFAWMTRKSEETITPWNFEEVVDKGASAQSFIERMTNFDKNLPNEKVLPKHSLLYEYFTVYNELTKVKYVTEGMRKPAFLSGEQKKAIVDLLFKTNRKVTVKQLKEDYFKKIECFDSVEISGVEDRFNASLGTYHDLLKIIKDKDFLDNEENEDILEDIVLTLTLFEDREMIEERLKTYAHLFDDKVMKQLKRRRYTGWGRLSRKLINGIRDKQSGKTILDFLKSDGFANRNFMQLIHDDSLTFKEDIQKAQVSGQGDSLHEHIANLAGSPAIKKGILQTVKVVDELVKVMGRHKPENIVIEMARENQTTQKGQKNSRERMKRIEEGIKELGSQILKEHPVENTQLQNEKLYLYYLQNGRDMYVDQELDINRLSDYDVDHIVPQSFLKDDSIDNKVLTRSDKARGKSDNVPSEEVVKKMKNYWRQLLNAKLITQRKFDNLTKAERGGLSELDKAGFIKRQLVETRQITKHVAQILDSRMNTKYDENDKLIREVKVITLKSKLVSDFRKDFQFYKVREINNYHHAHDAYLNAVVGTALIKKYPKLESEFVYGDYKVYDVRKMIAKSEQEIGKATAKYFFYSNIMNFFKTEITLANGEIRKRPLIETNGETGEIVWDKGRDFATVRKVLSMPQVNIVKKTEVQTGGFSKESILPKRNSDKLIARKKDWDPKKYGGFDSPTVAYSVLVVAKVEKGKSKKLKSVKELLGITIMERSSFEKNPIDFLEAKGYKEVKKDLIIKLPKYSLFELENGRKRMLASAGELQKGNELALPSKYVNFLYLASHYEKLKGSPEDNEQKQLFVEQHKHYLDEIIEQISEFSKRVILADANLDKVLSAYNKHRDKPIREQAENIIHLFTLTNLGAPAAFKYFDTTIDRKRYTSTKEVLDATLIHQSITGLYETRIDLSQLGGDGGPAPAPAPAPAPGGVQEISDSRPMLHIYLNGRRFLGLLDTGADKTCIAGRDWPANWPIHQTESSLQGLGMACGVARSSQPLRWQHEDKSGIIHPFVIPTLPFTLWGRDIMKDIKVRLMTDSPDDSQDLMIGAIESNLFADQISWKSDQPVWLNQWPLKQEKLQALQQLVTEQLQLGHLEESNSPWNTPVFVIKKKSGKWRLLQDLRAVNATMHDMGALQPGLPSPVAVPKGWEIIIIDLQDCFFNIKLHPEDCKRFAFSVPSPNFKRPYQRFQWKVLPQGMKNSPTLCQKFVDKAILTVRDKYQDSYIVHYMDDILLAHPSRSIVDEILTSMIQALNKHGLVVSTEKIQKYDNLKYLGTHIQGDSVSYQKLQIRTDKLRTLNDFQKLLGNINWIRPFLKLTTGELKPLFEILNGDSNPISTRKLTPEACKALQLMNERLSTARVKRLDLSQPWSLCILKTEYTPTACLWQDGVVEWIHLPHISPKVITPYDIFCTQLIIKGRHRSKELFSKDPDYIVVPYTKVQFDLLLQEKEDWPISLLGFLGEVHFHLPKDPLLTFTLQTAIIFPHMTSTTPLEKGIVIFTDGSANGRSVTYIQGREPIIKENTQNTAQQAEIVAVITAFEEVSQPFNLYTDSKYVTGLFPEIETATLSPRTKIYTELKHLQRLIHKRQEKFYIGHIRGHTGLPGPLAQGNAYADSLTRILTAAGKRTADGSEFEKRTADGSEFESPKKKAKVE

SEQ ID NO: 3170 - protein, 2116 aa, synthetic construct
  source 1..2116: note = Description of Artificial Sequence: Synthetic polypeptide
MPAAKRVKLDGGDKKYSIGLDIGTNSVGWAVITDEYKVPSKKFKVLGNTDRHSIKKNLIGALLFDSGETAEATRLKRTARRRYTRRKNRICYLQEIFSNEMAKVDDSFFHRLEESFLVEEDKKHERHPIFGNIVDEVAYHEKYPTIYHLRKKLVDSTDKADLRLIYLALAHMIKFRGHFLIEGDLNPDNSDVDKLFIQLVQTYNQLFEENPINASGVDAKAILSARLSKSRRLENLIAQLPGEKKNGLFGNLIALSLGLTPNFKSNFDLAEDAKLQLSKDTYDDDLDNLLAQIGDQYADLFLAAKNLSDAILLSDILRVNTEITKAPLSASMIKRYDEHHQDLTLLKALVRQQLPEKYKEIFFDQSKNGYAGYIDGGASQEEFYKFIKPILEKMDGTEELLVKLNREDLLRKQRTFDNGSIPHQIHLGELHAILRRQEDFYPFLKDNREKIEKILTFRIPYYVGPLARGNSRFAWMTRKSEETITPWNFEEVVDKGASAQSFIERMTNFDKNLPNEKVLPKHSLLYEYFTVYNELTKVKYVTEGMRKPAFLSGEQKKAIVDLLFKTNRKVTVKQLKEDYFKKIECFDSVEISGVEDRFNASLGTYHDLLKIIKDKDFLDNEENEDILEDIVLTLTLFEDREMIEERLKTYAHLFDDKVMKQLKRRRYTGWGRLSRKLINGIRDKQSGKTILDFLKSDGFANRNFMQLIHDDSLTFKEDIQKAQVSGQGDSLHEHIANLAGSPAIKKGILQTVKVVDELVKVMGRHKPENIVIEMARENQTTQKGQKNSRERMKRIEEGIKELGSQILKEHPVENTQLQNEKLYLYYLQNGRDMYVDQELDINRLSDYDVDHIVPQSFLKDDSIDNKVLTRSDKARGKSDNVPSEEVVKKMKNYWRQLLNAKLITQRKFDNLTKAERGGLSELDKAGFIKRQLVETRQITKHVAQILDSRMNTKYDENDKLIREVKVITLKSKLVSDFRKDFQFYKVREINNYHHAHDAYLNAVVGTALIKKYPKLESEFVYGDYKVYDVRKMIAKSEQEIGKATAKYFFYSNIMNFFKTEITLANGEIRKRPLIETNGETGEIVWDKGRDFATVRKVLSMPQVNIVKKTEVQTGGFSKESILPKRNSDKLIARKKDWDPKKYGGFDSPTVAYSVLVVAKVEKGKSKKLKSVKELLGITIMERSSFEKNPIDFLEAKGYKEVKKDLIIKLPKYSLFELENGRKRMLASAGELQKGNELALPSKYVNFLYLASHYEKLKGSPEDNEQKQLFVEQHKHYLDEIIEQISEFSKRVILADANLDKVLSAYNKHRDKPIREQAENIIHLFTLTNLGAPAAFKYFDTTIDRKRYTSTKEVLDATLIHQSITGLYETRIDLSQLGGDGGGGSEAAAKPAPGGVQEISDSRPMLHIYLNGRRFLGLLDTGADKTCIAGRDWPANWPIHQTESSLQGLGMACGVARSSQPLRWQHEDKSGIIHPFVIPTLPFTLWGRDIMKDIKVRLMTDSPDDSQDLMIGAIESNLFADQISWKSDQPVWLNQWPLKQEKLQALQQLVTEQLQLGHLEESNSPWNTPVFVIKKKSGKWRLLQDLRAVNATMHDMGALQPGLPSPVAVPKGWEIIIIDLQDCFFNIKLHPEDCKRFAFSVPSPNFKRPYQRFQWKVLPQGMKNSPTLCQKFVDKAILTVRDKYQDSYIVHYMDDILLAHPSRSIVDEILTSMIQALNKHGLVVSTEKIQKYDNLKYLGTHIQGDSVSYQKLQIRTDKLRTLNDFQKLLGNINWIRPFLKLTTGELKPLFEILNGDSNPISTRKLTPEACKALQLMNERLSTARVKRLDLSQPWSLCILKTEYTPTACLWQDGVVEWIHLPHISPKVITPYDIFCTQLIIKGRHRSKELFSKDPDYIVVPYTKVQFDLLLQEKEDWPISLLGFLGEVHFHLPKDPLLTFTLQTAIIFPHMTSTTPLEKGIVIFTDGSANGRSVTYIQGREPIIKENTQNTAQQAEIVAVITAFEEVSQPFNLYTDSKYVTGLFPEIETATLSPRTKIYTELKHLQRLIHKRQEKFYIGHIRGHTGLPGPLAQGNAYADSLTRILTAAGKRTADGSEFEKRTADGSEFESPKKKAKVE

SEQ ID NO: 3171 - protein, 2116 aa, synthetic construct
  source 1..2116: note = Description of Artificial Sequence: Synthetic polypeptide
MPAAKRVKLDGGDKKYSIGLDIGTNSVGWAVITDEYKVPSKKFKVLGNTDRHSIKKNLIGALLFDSGETAEATRLKRTARRRYTRRKNRICYLQEIFSNEMAKVDDSFFHRLEESFLVEEDKKHERHPIFGNIVDEVAYHEKYPTIYHLRKKLVDSTDKADLRLIYLALAHMIKFRGHFLIEGDLNPDNSDVDKLFIQLVQTYNQLFEENPINASGVDAKAILSARLSKSRRLENLIAQLPGEKKNGLFGNLIALSLGLTPNFKSNFDLAEDAKLQLSKDTYDDDLDNLLAQIGDQYADLFLAAKNLSDAILLSDILRVNTEITKAPLSASMIKRYDEHHQDLTLLKALVRQQLPEKYKEIFFDQSKNGYAGYIDGGASQEEFYKFIKPILEKMDGTEELLVKLNREDLLRKQRTFDNGSIPHQIHLGELHAILRRQEDFYPFLKDNREKIEKILTFRIPYYVGPLARGNSRFAWMTRKSEETITPWNFEEVVDKGASAQSFIERMTNFDKNLPNEKVLPKHSLLYEYFTVYNELTKVKYVTEGMRKPAFLSGEQKKAIVDLLFKTNRKVTVKQLKEDYFKKIECFDSVEISGVEDRFNASLGTYHDLLKIIKDKDFLDNEENEDILEDIVLTLTLFEDREMIEERLKTYAHLFDDKVMKQLKRRRYTGWGRLSRKLINGIRDKQSGKTILDFLKSDGFANRNFMQLIHDDSLTFKEDIQKAQVSGQGDSLHEHIANLAGSPAIKKGILQTVKVVDELVKVMGRHKPENIVIEMARENQTTQKGQKNSRERMKRIEEGIKELGSQILKEHPVENTQLQNEKLYLYYLQNGRDMYVDQELDINRLSDYDVDHIVPQSFLKDDSIDNKVLTRSDKARGKSDNVPSEEVVKKMKNYWRQLLNAKLITQRKFDNLTKAERGGLSELDKAGFIKRQLVETRQITKHVAQILDSRMNTKYDENDKLIREVKVITLKSKLVSDFRKDFQFYKVREINNYHHAHDAYLNAVVGTALIKKYPKLESEFVYGDYKVYDVRKMIAKSEQEIGKATAKYFFYSNIMNFFKTEITLANGEIRKRPLIETNGETGEIVWDKGRDFATVRKVLSMPQVNIVKKTEVQTGGFSKESILPKRNSDKLIARKKDWDPKKYGGFDSPTVAYSVLVVAKVEKGKSKKLKSVKELLGITIMERSSFEKNPIDFLEAKGYKEVKKDLIIKLPKYSLFELENGRKRMLASAGELQKGNELALPSKYVNFLYLASHYEKLKGSPEDNEQKQLFVEQHKHYLDEIIEQISEFSKRVILADANLDKVLSAYNKHRDKPIREQAENIIHLFTLTNLGAPAAFKYFDTTIDRKRYTSTKEVLDATLIHQSITGLYETRIDLSQLGGDGGEAAAKGSSGGSGGWVQEISDSRPMLHIYLNGRRFLGLLNTGADKTCIAGRDWPANWPIHQTESSLQGLGMACGVARSSQPLRWQHEDKSGIIHPFVIPTLPFTLWGRDIMKDIKVRLMTDSPDDSQDLMIGAIESNLFADQISWKSDQPVWLNQWPLKQEKLQALQQLVTEQLQLGHLEESNSPWNTPVFVIKKKSGKWRLLQDLRAVNATMHDMGALQPGLPSPVAVPKGWEIIIIDLQDCFFNIKLHPEDCKRFAFSVPSPNFKRPYQRFQWKVLPQGMKNSPTLCQKFVDKAILTVRDKYQDSYIVHYMDDILLAHPSRSIVDEILTSMIQALNKHGLVVSTEKIQKYDNLKYLGTHIQGDSVSYQKLQIRTDKLRTLNDFQKLLGNINWIRPFLKLTTGELKPLFEILNGDSNPISTRKLTPEACKALQLMNERLSTARVKRLDLSQPWSLCILKTEYTPTACLWQDGVVEWIHLPHISPKVITPYDIFCTQLIIKGRHRSKELFSKDPDYIVVPYTKVQFDLLLQEKEDWPISLLGFLGEVHFHLPKDPLLTFTLQTAIIFPHMTSTTPLEKGIVIFTDGSANGRSVTYIQGREPIIKENTQNTAQQAEIVAVITAFEEVSQPFNLYTDSKYVTGLFPEIETATLSPRTKIYTELKHLQRLIHKRQEKFYIGHIRGHTGLPGPLAQGNAYADSLTRILTAGKRTADGSEFEKRTADGSEFESPKKKAKVE

SEQ ID NO: 3172 - protein, 2135 aa, synthetic construct
  source 1..2135: note = Description of Artificial Sequence: Synthetic polypeptide
MPAAKRVKLDGGDKKYSIGLDIGTNSVGWAVITDEYKVPSKKFKVLGNTDRHSIKKNLIGALLFDSGETAEATRLKRTARRRYTRRKNRICYLQEIFSNEMAKVDDSFFHRLEESFLVEEDKKHERHPIFGNIVDEVAYHEKYPTIYHLRKKLVDSTDKADLRLIYLALAHMIKFRGHFLIEGDLNPDNSDVDKLFIQLVQTYNQLFEENPINASGVDAKAILSARLSKSRRLENLIAQLPGEKKNGLFGNLIALSLGLTPNFKSNFDLAEDAKLQLSKDTYDDDLDNLLAQIGDQYADLFLAAKNLSDAILLSDILRVNTEITKAPLSASMIKRYDEHHQDLTLLKALVRQQLPEKYKEIFFDQSKNGYAGYIDGGASQEEFYKFIKPILEKMDGTEELLVKLNREDLLRKQRTFDNGSIPHQIHLGELHAILRRQEDFYPFLKDNREKIEKILTFRIPYYVGPLARGNSRFAWMTRKSEETITPWNFEEVVDKGASAQSFIERMTNFDKNLPNEKVLPKHSLLYEYFTVYNELTKVKYVTEGMRKPAFLSGEQKKAIVDLLFKTNRKVTVKQLKEDYFKKIECFDSVEISGVEDRFNASLGTYHDLLKIIKDKDFLDNEENEDILEDIVLTLTLFEDREMIEERLKTYAHLFDDKVMKQLKRRRYTGWGRLSRKLINGIRDKQSGKTILDFLKSDGFANRNFMQLIHDDSLTFKEDIQKAQVSGQGDSLHEHIANLAGSPAIKKGILQTVKVVDELVKVMGRHKPENIVIEMARENQTTQKGQKNSRERMKRIEEGIKELGSQILKEHPVENTQLQNEKLYLYYLQNGRDMYVDQELDINRLSDYDVDHIVPQSFLKDDSIDNKVLTRSDKARGKSDNVPSEEVVKKMKNYWRQLLNAKLITQRKFDNLTKAERGGLSELDKAGFIKRQLVETRQITKHVAQILDSRMNTKYDENDKLIREVKVITLKSKLVSDFRKDFQFYKVREINNYHHAHDAYLNAVVGTALIKKYPKLESEFVYGDYKVYDVRKMIAKSEQEIGKATAKYFFYSNIMNFFKTEITLANGEIRKRPLIETNGETGEIVWDKGRDFATVRKVLSMPQVNIVKKTEVQTGGFSKESILPKRNSDKLIARKKDWDPKKYGGFDSPTVAYSVLVVAKVEKGKSKKLKSVKELLGITIMERSSFEKNPIDFLEAKGYKEVKKDLIIKLPKYSLFELENGRKRMLASAGELQKGNELALPSKYVNFLYLASHYEKLKGSPEDNEQKQLFVEQHKHYLDEIIEQISEFSKRVILADANLDKVLSAYNKHRDKPIREQAENIIHLFTLTNLGAPAAFKYFDTTIDRKRYTSTKEVLDATLIHQSITGLYETRIDLSQLGGDGGEAAAKEAAAKEAAAKEAAAKEAAAKEAAAKGGWVQEISDSRPMLHIYLNGRRFLGLLNTGADKTCIAGRDWPANWPIHQTESSLQGLGMACGVARSSQPLRWQHEDKSGIIHPFVIPTLPFTLWGRDIMKDIKVRLMTDSPDDSQDLMIGAIESNLFADQISWKSDQPVWLNQWPLKQEKLQALQQLVTEQLQLGHLEESNSPWNTPVFVIKKKSGKWRLLQDLRAVNATMHDMGALQPGLPSPVAVPKGWEIIIIDLQDCFFNIKLHPEDCKRFAFSVPSPNFKRPYQRFQWKVLPQGMKNSPTLCQKFVDKAILTVRDKYQDSYIVHYMDDILLAHPSRSIVDEILTSMIQALNKHGLVVSTEKIQKYDNLKYLGTHIQGDSVSYQKLQIRTDKLRTLNDFQKLLGNINWIRPFLKLTTGELKPLFEILNGDSNPISTRKLTPEACKALQLMNERLSTARVKRLDLSQPWSLCILKTEYTPTACLWQDGVVEWIHLPHISPKVITPYDIFCTQLIIKGRHRSKELFSKDPDYIVVPYTKVQFDLLLQEKEDWPISLLGFLGEVHFHLPKDPLLTFTLQTAIIFPHMTSTTPLEKGIVIFTDGSANGRSVTYIQGREPIIKENTQNTAQQAEIVAVITAFEEVSQPFNLYTDSKYVTGLFPEIETATLSPRTKIYTELKHLQRLIHKRQEKFYIGHIRGHTGLPGPLAQGNAYADSLTRILTAGKRTADGSEFEKRTADGSEFESPKKKAKVE

SEQ ID NO: 3173 - protein, 2135 aa, synthetic construct
  source 1..2135: note = Description of Artificial Sequence: Synthetic polypeptide
MPAAKRVKLDGGDKKYSIGLDIGTNSVGWAVITDEYKVPSKKFKVLGNTDRHSIKKNLIGALLFDSGETAEATRLKRTARRRYTRRKNRICYLQEIFSNEMAKVDDSFFHRLEESFLVEEDKKHERHPIFGNIVDEVAYHEKYPTIYHLRKKLVDSTDKADLRLIYLALAHMIKFRGHFLIEGDLNPDNSDVDKLFIQLVQTYNQLFEENPINASGVDAKAILSARLSKSRRLENLIAQLPGEKKNGLFGNLIALSLGLTPNFKSNFDLAEDAKLQLSKDTYDDDLDNLLAQIGDQYADLFLAAKNLSDAILLSDILRVNTEITKAPLSASMIKRYDEHHQDLTLLKALVRQQLPEKYKEIFFDQSKNGYAGYIDGGASQEEFYKFIKPILEKMDGTEELLVKLNREDLLRKQRTFDNGSIPHQIHLGELHAILRRQEDFYPFLKDNREKIEKILTFRIPYYVGPLARGNSRFAWMTRKSEETITPWNFEEVVDKGASAQSFIERMTNFDKNLPNEKVLPKHSLLYEYFTVYNELTKVKYVTEGMRKPAFLSGEQKKAIVDLLFKTNRKVTVKQLKEDYFKKIECFDSVEISGVEDRFNASLGTYHDLLKIIKDKDFLDNEENEDILEDIVLTLTLFEDREMIEERLKTYAHLFDDKVMKQLKRRRYTGWGRLSRKLINGIRDKQSGKTILDFLKSDGFANRNFMQLIHDDSLTFKEDIQKAQVSGQGDSLHEHIANLAGSPAIKKGILQTVKVVDELVKVMGRHKPENIVIEMARENQTTQKGQKNSRERMKRIEEGIKELGSQILKEHPVENTQLQNEKLYLYYLQNGRDMYVDQELDINRLSDYDVDHIVPQSFLKDDSIDNKVLTRSDKARGKSDNVPSEEVVKKMKNYWRQLLNAKLITQRKFDNLTKAERGGLSELDKAGFIKRQLVETRQITKHVAQILDSRMNTKYDENDKLIREVKVITLKSKLVSDFRKDFQFYKVREINNYHHAHDAYLNAVVGTALIKKYPKLESEFVYGDYKVYDVRKMIAKSEQEIGKATAKYFFYSNIMNFFKTEITLANGEIRKRPLIETNGETGEIVWDKGRDFATVRKVLSMPQVNIVKKTEVQTGGFSKESILPKRNSDKLIARKKDWDPKKYGGFDSPTVAYSVLVVAKVEKGKSKKLKSVKELLGITIMERSSFEKNPIDFLEAKGYKEVKKDLIIKLPKYSLFELENGRKRMLASAGELQKGNELALPSKYVNFLYLASHYEKLKGSPEDNEQKQLFVEQHKHYLDEIIEQISEFSKRVILADANLDKVLSAYNKHRDKPIREQAENIIHLFTLTNLGAPAAFKYFDTTIDRKRYTSTKEVLDATLIHQSITGLYETRIDLSQLGGDGGGGGGSGGGGSGGGGSGGGGSGGGGSGGGGSGGWVQEISDSRPMLHIYLNGRRFLGLLNTGADKTCIAGRDWPANWPIHQTESSLQGLGMACGVARSSQPLRWQHEDKSGIIHPFVIPTLPFTLWGRDIMKDIKVRLMTDSPDDSQDLMIGAIESNLFADQISWKSDQPVWLNQWPLKQEKLQALQQLVTEQLQLGHLEESNSPWNTPVFVIKKKSGKWRLLQDLRAVNATMHDMGALQPGLPSPVAVPKGWEIIIIDLQDCFFNIKLHPEDCKRFAFSVPSPNFKRPYQRFQWKVLPQGMKNSPTLCQKFVDKAILTVRDKYQDSYIVHYMDDILLAHPSRSIVDEILTSMIQALNKHGLVVSTEKIQKYDNLKYLGTHIQGDSVSYQKLQIRTDKLRTLNDFQKLLGNINWIRPFLKLTTGELKPLFEILNGDSNPISTRKLTPEACKALQLMNERLSTARVKRLDLSQPWSLCILKTEYTPTACLWQDGVVEWIHLPHISPKVITPYDIFCTQLIIKGRHRSKELFSKDPDYIVVPYTKVQFDLLLQEKEDWPISLLGFLGEVHFHLPKDPLLTFTLQTAIIFPHMTSTTPLEKGIVIFTDGSANGRSVTYIQGREPIIKENTQNTAQQAEIVAVITAFEEVSQPFNLYTDSKYVTGLFPEIETATLSPRTKIYTELKHLQRLIHKRQEKFYIGHIRGHTGLPGPLAQGNAYADSLTRILTAGKRTADGSEFEKRTADGSEFESPKKKAKVE

SEQ ID NO: 3174 - protein, 2130 aa, synthetic construct
  source 1..2130: note = Description of Artificial Sequence: Synthetic polypeptide
MPAAKRVKLDGGDKKYSIGLDIGTNSVGWAVITDEYKVPSKKFKVLGNTDRHSIKKNLIGALLFDSGETAEATRLKRTARRRYTRRKNRICYLQEIFSNEMAKVDDSFFHRLEESFLVEEDKKHERHPIFGNIVDEVAYHEKYPTIYHLRKKLVDSTDKADLRLIYLALAHMIKFRGHFLIEGDLNPDNSDVDKLFIQLVQTYNQLFEENPINASGVDAKAILSARLSKSRRLENLIAQLPGEKKNGLFGNLIALSLGLTPNFKSNFDLAEDAKLQLSKDTYDDDLDNLLAQIGDQYADLFLAAKNLSDAILLSDILRVNTEITKAPLSASMIKRYDEHHQDLTLLKALVRQQLPEKYKEIFFDQSKNGYAGYIDGGASQEEFYKFIKPILEKMDGTEELLVKLNREDLLRKQRTFDNGSIPHQIHLGELHAILRRQEDFYPFLKDNREKIEKILTFRIPYYVGPLARGNSRFAWMTRKSEETITPWNFEEVVDKGASAQSFIERMTNFDKNLPNEKVLPKHSLLYEYFTVYNELTKVKYVTEGMRKPAFLSGEQKKAIVDLLFKTNRKVTVKQLKEDYFKKIECFDSVEISGVEDRFNASLGTYHDLLKIIKDKDFLDNEENEDILEDIVLTLTLFEDREMIEERLKTYAHLFDDKVMKQLKRRRYTGWGRLSRKLINGIRDKQSGKTILDFLKSDGFANRNFMQLIHDDSLTFKEDIQKAQVSGQGDSLHEHIANLAGSPAIKKGILQTVKVVDELVKVMGRHKPENIVIEMARENQTTQKGQKNSRERMKRIEEGIKELGSQILKEHPVENTQLQNEKLYLYYLQNGRDMYVDQELDINRLSDYDVDHIVPQSFLKDDSIDNKVLTRSDKARGKSDNVPSEEVVKKMKNYWRQLLNAKLITQRKFDNLTKAERGGLSELDKAGFIKRQLVETRQITKHVAQILDSRMNTKYDENDKLIREVKVITLKSKLVSDFRKDFQFYKVREINNYHHAHDAYLNAVVGTALIKKYPKLESEFVYGDYKVYDVRKMIAKSEQEIGKATAKYFFYSNIMNFFKTEITLANGEIRKRPLIETNGETGEIVWDKGRDFATVRKVLSMPQVNIVKKTEVQTGGFSKESILPKRNSDKLIARKKDWDPKKYGGFDSPTVAYSVLVVAKVEKGKSKKLKSVKELLGITIMERSSFEKNPIDFLEAKGYKEVKKDLIIKLPKYSLFELENGRKRMLASAGELQKGNELALPSKYVNFLYLASHYEKLKGSPEDNEQKQLFVEQHKHYLDEIIEQISEFSKRVILADANLDKVLSAYNKHRDKPIREQAENIIHLFTLTNLGAPAAFKYFDTTIDRKRYTSTKEVLDATLIHQSITGLYETRIDLSQLGGDGGEAAAKEAAAKEAAAKEAAAKEAAAKGGWVQEISDSRPMLHIYLNGRRFLGLLNTGADKTCIAGRDWPANWPIHQTESSLQGLGMACGVARSSQPLRWQHEDKSGIIHPFVIPTLPFTLWGRDIMKDIKVRLMTDSPDDSQDLMIGAIESNLFADQISWKSDQPVWLNQWPLKQEKLQALQQLVTEQLQLGHLEESNSPWNTPVFVIKKKSGKWRLLQDLRAVNATMHDMGALQPGLPSPVAVPKGWEIIIIDLQDCFFNIKLHPEDCKRFAFSVPSPNFKRPYQRFQWKVLPQGMKNSPTLCQKFVDKAILTVRDKYQDSYIVHYMDDILLAHPSRSIVDEILTSMIQALNKHGLVVSTEKIQKYDNLKYLGTHIQGDSVSYQKLQIRTDKLRTLNDFQKLLGNINWIRPFLKLTTGELKPLFEILNGDSNPISTRKLTPEACKALQLMNERLSTARVKRLDLSQPWSLCILKTEYTPTACLWQDGVVEWIHLPHISPKVITPYDIFCTQLIIKGRHRSKELFSKDPDYIVVPYTKVQFDLLLQEKEDWPISLLGFLGEVHFHLPKDPLLTFTLQTAIIFPHMTSTTPLEKGIVIFTDGSANGRSVTYIQGREPIIKENTQNTAQQAEIVAVITAFEEVSQPFNLYTDSKYVTGLFPEIETATLSPRTKIYTELKHLQRLIHKRQEKFYIGHIRGHTGLPGPLAQGNAYADSLTRILTAGKRTADGSEFEKRTADGSEFESPKKKAKVE

SEQ ID NO: 3175 - protein, 2116 aa, synthetic construct
  source 1..2116: note = Description of Artificial Sequence: Synthetic polypeptide
MPAAKRVKLDGGDKKYSIGLDIGTNSVGWAVITDEYKVPSKKFKVLGNTDRHSIKKNLIGALLFDSGETAEATRLKRTARRRYTRRKNRICYLQEIFSNEMAKVDDSFFHRLEESFLVEEDKKHERHPIFGNIVDEVAYHEKYPTIYHLRKKLVDSTDKADLRLIYLALAHMIKFRGHFLIEGDLNPDNSDVDKLFIQLVQTYNQLFEENPINASGVDAKAILSARLSKSRRLENLIAQLPGEKKNGLFGNLIALSLGLTPNFKSNFDLAEDAKLQLSKDTYDDDLDNLLAQIGDQYADLFLAAKNLSDAILLSDILRVNTEITKAPLSASMIKRYDEHHQDLTLLKALVRQQLPEKYKEIFFDQSKNGYAGYIDGGASQEEFYKFIKPILEKMDGTEELLVKLNREDLLRKQRTFDNGSIPHQIHLGELHAILRRQEDFYPFLKDNREKIEKILTFRIPYYVGPLARGNSRFAWMTRKSEETITPWNFEEVVDKGASAQSFIERMTNFDKNLPNEKVLPKHSLLYEYFTVYNELTKVKYVTEGMRKPAFLSGEQKKAIVDLLFKTNRKVTVKQLKEDYFKKIECFDSVEISGVEDRFNASLGTYHDLLKIIKDKDFLDNEENEDILEDIVLTLTLFEDREMIEERLKTYAHLFDDKVMKQLKRRRYTGWGRLSRKLINGIRDKQSGKTILDFLKSDGFANRNFMQLIHDDSLTFKEDIQKAQVSGQGDSLHEHIANLAGSPAIKKGILQTVKVVDELVKVMGRHKPENIVIEMARENQTTQKGQKNSRERMKRIEEGIKELGSQILKEHPVENTQLQNEKLYLYYLQNGRDMYVDQELDINRLSDYDVDHIVPQSFLKDDSIDNKVLTRSDKARGKSDNVPSEEVVKKMKNYWRQLLNAKLITQRKFDNLTKAERGGLSELDKAGFIKRQLVETRQITKHVAQILDSRMNTKYDENDKLIREVKVITLKSKLVSDFRKDFQFYKVREINNYHHAHDAYLNAVVGTALIKKYPKLESEFVYGDYKVYDVRKMIAKSEQEIGKATAKYFFYSNIMNFFKTEITLANGEIRKRPLIETNGETGEIVWDKGRDFATVRKVLSMPQVNIVKKTEVQTGGFSKESILPKRNSDKLIARKKDWDPKKYGGFDSPTVAYSVLVVAKVEKGKSKKLKSVKELLGITIMERSSFEKNPIDFLEAKGYKEVKKDLIIKLPKYSLFELENGRKRMLASAGELQKGNELALPSKYVNFLYLASHYEKLKGSPEDNEQKQLFVEQHKHYLDEIIEQISEFSKRVILADANLDKVLSAYNKHRDKPIREQAENIIHLFTLTNLGAPAAFKYFDTTIDRKRYTSTKEVLDATLIHQSITGLYETRIDLSQLGGDGGPAPAPAPAPAPGGWVQEISDSRPMLHIYLNGRRFLGLLNTGADKTCIAGRDWPANWPIHQTESSLQGLGMACGVARSSQPLRWQHEDKSGIIHPFVIPTLPFTLWGRDIMKDIKVRLMTDSPDDSQDLMIGAIESNLFADQISWKSDQPVWLNQWPLKQEKLQALQQLVTEQLQLGHLEESNSPWNTPVFVIKKKSGKWRLLQDLRAVNATMHDMGALQPGLPSPVAVPKGWEIIIIDLQDCFFNIKLHPEDCKRFAFSVPSPNFKRPYQRFQWKVLPQGMKNSPTLCQKFVDKAILTVRDKYQDSYIVHYMDDILLAHPSRSIVDEILTSMIQALNKHGLVVSTEKIQKYDNLKYLGTHIQGDSVSYQKLQIRTDKLRTLNDFQKLLGNINWIRPFLKLTTGELKPLFEILNGDSNPISTRKLTPEACKALQLMNERLSTARVKRLDLSQPWSLCILKTEYTPTACLWQDGVVEWIHLPHISPKVITPYDIFCTQLIIKGRHRSKELFSKDPDYIVVPYTKVQFDLLLQEKEDWPISLLGFLGEVHFHLPKDPLLTFTLQTAIIFPHMTSTTPLEKGIVIFTDGSANGRSVTYIQGREPIIKENTQNTAQQAEIVAVITAFEEVSQPFNLYTDSKYVTGLFPEIETATLSPRTKIYTELKHLQRLIHKRQEKFYIGHIRGHTGLPGPLAQGNAYADSLTRILTAGKRTADGSEFEKRTADGSEFESPKKKAKVE

SEQ ID NO: 3176 - protein, 2114 aa, synthetic construct
  source 1..2114: note = Description of Artificial Sequence: Synthetic polypeptide
MPAAKRVKLDGGDKKYSIGLDIGTNSVGWAVITDEYKVPSKKFKVLGNTDRHSIKKNLIGALLFDSGETAEATRLKRTARRRYTRRKNRICYLQEIFSNEMAKVDDSFFHRLEESFLVEEDKKHERHPIFGNIVDEVAYHEKYPTIYHLRKKLVDSTDKADLRLIYLALAHMIKFRGHFLIEGDLNPDNSDVDKLFIQLVQTYNQLFEENPINASGVDAKAILSARLSKSRRLENLIAQLPGEKKNGLFGNLIALSLGLTPNFKSNFDLAEDAKLQLSKDTYDDDLDNLLAQIGDQYADLFLAAKNLSDAILLSDILRVNTEITKAPLSASMIKRYDEHHQDLTLLKALVRQQLPEKYKEIFFDQSKNGYAGYIDGGASQEEFYKFIKPILEKMDGTEELLVKLNREDLLRKQRTFDNGSIPHQIHLGELHAILRRQEDFYPFLKDNREKIEKILTFRIPYYVGPLARGNSRFAWMTRKSEETITPWNFEEVVDKGASAQSFIERMTNFDKNLPNEKVLPKHSLLYEYFTVYNELTKVKYVTEGMRKPAFLSGEQKKAIVDLLFKTNRKVTVKQLKEDYFKKIECFDSVEISGVEDRFNASLGTYHDLLKIIKDKDFLDNEENEDILEDIVLTLTLFEDREMIEERLKTYAHLFDDKVMKQLKRRRYTGWGRLSRKLINGIRDKQSGKTILDFLKSDGFANRNFMQLIHDDSLTFKEDIQKAQVSGQGDSLHEHIANLAGSPAIKKGILQTVKVVDELVKVMGRHKPENIVIEMARENQTTQKGQKNSRERMKRIEEGIKELGSQILKEHPVENTQLQNEKLYLYYLQNGRDMYVDQELDINRLSDYDVDHIVPQSFLKDDSIDNKVLTRSDKARGKSDNVPSEEVVKKMKNYWRQLLNAKLITQRKFDNLTKAERGGLSELDKAGFIKRQLVETRQITKHVAQILDSRMNTKYDENDKLIREVKVITLKSKLVSDFRKDFQFYKVREINNYHHAHDAYLNAVVGTALIKKYPKLESEFVYGDYKVYDVRKMIAKSEQEIGKATAKYFFYSNIMNFFKTEITLANGEIRKRPLIETNGETGEIVWDKGRDFATVRKVLSMPQVNIVKKTEVQTGGFSKESILPKRNSDKLIARKKDWDPKKYGGFDSPTVAYSVLVVAKVEKGKSKKLKSVKELLGITIMERSSFEKNPIDFLEAKGYKEVKKDLIIKLPKYSLFELENGRKRMLASAGELQKGNELALPSKYVNFLYLASHYEKLKGSPEDNEQKQLFVEQHKHYLDEIIEQISEFSKRVILADANLDKVLSAYNKHRDKPIREQAENIIHLFTLTNLGAPAAFKYFDTTIDRKRYTSTKEVLDATLIHQSITGLYETRIDLSQLGGDGGPAPGSSGGSGGWVQEISDSRPMLHIYLNGRRFLGLLNTGADKTCIAGRDWPANWPIHQTESSLQGLGMACGVARSSQPLRWQHEDKSGIIHPFVIPTLPFTLWGRDIMKDIKVRLMTDSPDDSQDLMIGAIESNLFADQISWKSDQPVWLNQWPLKQEKLQALQQLVTEQLQLGHLEESNSPWNTPVFVIKKKSGKWRLLQDLRAVNATMHDMGALQPGLPSPVAVPKGWEIIIIDLQDCFFNIKLHPEDCKRFAFSVPSPNFKRPYQRFQWKVLPQGMKNSPTLCQKFVDKAILTVRDKYQDSYIVHYMDDILLAHPSRSIVDEILTSMIQALNKHGLVVSTEKIQKYDNLKYLGTHIQGDSVSYQKLQIRTDKLRTLNDFQKLLGNINWIRPFLKLTTGELKPLFEILNGDSNPISTRKLTPEACKALQLMNERLSTARVKRLDLSQPWSLCILKTEYTPTACLWQDGVVEWIHLPHISPKVITPYDIFCTQLIIKGRHRSKELFSKDPDYIVVPYTKVQFDLLLQEKEDWPISLLGFLGEVHFHLPKDPLLTFTLQTAIIFPHMTSTTPLEKGIVIFTDGSANGRSVTYIQGREPIIKENTQNTAQQAEIVAVITAFEEVSQPFNLYTDSKYVTGLFPEIETATLSPRTKIYTELKHLQRLIHKRQEKFYIGHIRGHTGLPGPLAQGNAYADSLTRILTAGKRTADGSEFEKRTADGSEFESPKKKAKVE

SEQ ID NO: 3177 - protein, 2113 aa, synthetic construct
  source 1..2113: note = Description of Artificial Sequence: Synthetic polypeptide
MPAAKRVKLDGGDKKYSIGLDIGTNSVGWAVITDEYKVPSKKFKVLGNTDRHSIKKNLIGALLFDSGETAEATRLKRTARRRYTRRKNRICYLQEIFSNEMAKVDDSFFHRLEESFLVEEDKKHERHPIFGNIVDEVAYHEKYPTIYHLRKKLVDSTDKADLRLIYLALAHMIKFRGHFLIEGDLNPDNSDVDKLFIQLVQTYNQLFEENPINASGVDAKAILSARLSKSRRLENLIAQLPGEKKNGLFGNLIALSLGLTPNFKSNFDLAEDAKLQLSKDTYDDDLDNLLAQIGDQYADLFLAAKNLSDAILLSDILRVNTEITKAPLSASMIKRYDEHHQDLTLLKALVRQQLPEKYKEIFFDQSKNGYAGYIDGGASQEEFYKFIKPILEKMDGTEELLVKLNREDLLRKQRTFDNGSIPHQIHLGELHAILRRQEDFYPFLKDNREKIEKILTFRIPYYVGPLARGNSRFAWMTRKSEETITPWNFEEVVDKGASAQSFIERMTNFDKNLPNEKVLPKHSLLYEYFTVYNELTKVKYVTEGMRKPAFLSGEQKKAIVDLLFKTNRKVTVKQLKEDYFKKIECFDSVEISGVEDRFNASLGTYHDLLKIIKDKDFLDNEENEDILEDIVLTLTLFEDREMIEERLKTYAHLFDDKVMKQLKRRRYTGWGRLSRKLINGIRDKQSGKTILDFLKSDGFANRNFMQLIHDDSLTFKEDIQKAQVSGQGDSLHEHIANLAGSPAIKKGILQTVKVVDELVKVMGRHKPENIVIEMARENQTTQKGQKNSRERMKRIEEGIKELGSQILKEHPVENTQLQNEKLYLYYLQNGRDMYVDQELDINRLSDYDVDHIVPQSFLKDDSIDNKVLTRSDKARGKSDNVPSEEVVKKMKNYWRQLLNAKLITQRKFDNLTKAERGGLSELDKAGFIKRQLVETRQITKHVAQILDSRMNTKYDENDKLIREVKVITLKSKLVSDFRKDFQFYKVREINNYHHAHDAYLNAVVGTALIKKYPKLESEFVYGDYKVYDVRKMIAKSEQEIGKATAKYFFYSNIMNFFKTEITLANGEIRKRPLIETNGETGEIVWDKGRDFATVRKVLSMPQVNIVKKTEVQTGGFSKESILPKRNSDKLIARKKDWDPKKYGGFDSPTVAYSVLVVAKVEKGKSKKLKSVKELLGITIMERSSFEKNPIDFLEAKGYKEVKKDLIIKLPKYSLFELENGRKRMLASAGELQKGNELALPSKYVNFLYLASHYEKLKGSPEDNEQKQLFVEQHKHYLDEIIEQISEFSKRVILADANLDKVLSAYNKHRDKPIREQAENIIHLFTLTNLGAPAAFKYFDTTIDRKRYTSTKEVLDATLIHQSITGLYETRIDLSQLGGDGGGGGEAAAKGGWVQEISDSRPMLHIYLNGRRFLGLLNTGADKTCIAGRDWPANWPIHQTESSLQGLGMACGVARSSQPLRWQHEDKSGIIHPFVIPTLPFTLWGRDIMKDIKVRLMTDSPDDSQDLMIGAIESNLFADQISWKSDQPVWLNQWPLKQEKLQALQQLVTEQLQLGHLEESNSPWNTPVFVIKKKSGKWRLLQDLRAVNATMHDMGALQPGLPSPVAVPKGWEIIIIDLQDCFFNIKLHPEDCKRFAFSVPSPNFKRPYQRFQWKVLPQGMKNSPTLCQKFVDKAILTVRDKYQDSYIVHYMDDILLAHPSRSIVDEILTSMIQALNKHGLVVSTEKIQKYDNLKYLGTHIQGDSVSYQKLQIRTDKLRTLNDFQKLLGNINWIRPFLKLTTGELKPLFEILNGDSNPISTRKLTPEACKALQLMNERLSTARVKRLDLSQPWSLCILKTEYTPTACLWQDGVVEWIHLPHISPKVITPYDIFCTQLIIKGRHRSKELFSKDPDYIVVPYTKVQFDLLLQEKEDWPISLLGFLGEVHFHLPKDPLLTFTLQTAIIFPHMTSTTPLEKGIVIFTDGSANGRSVTYIQGREPIIKENTQNTAQQAEIVAVITAFEEVSQPFNLYTDSKYVTGLFPEIETATLSPRTKIYTELKHLQRLIHKRQEKFYIGHIRGHTGLPGPLAQGNAYADSLTRILTAGKRTADGSEFEKRTADGSEFESPKKKAKVE

SEQ ID NO: 3178 - protein, 2116 aa, synthetic construct
  source 1..2116: note = Description of Artificial Sequence: Synthetic polypeptide
MPAAKRVKLDGGDKKYSIGLDIGTNSVGWAVITDEYKVPSKKFKVLGNTDRHSIKKNLIGALLFDSGETAEATRLKRTARRRYTRRKNRICYLQEIFSNEMAKVDDSFFHRLEESFLVEEDKKHERHPIFGNIVDEVAYHEKYPTIYHLRKKLVDSTDKADLRLIYLALAHMIKFRGHFLIEGDLNPDNSDVDKLFIQLVQTYNQLFEENPINASGVDAKAILSARLSKSRRLENLIAQLPGEKKNGLFGNLIALSLGLTPNFKSNFDLAEDAKLQLSKDTYDDDLDNLLAQIGDQYADLFLAAKNLSDAILLSDILRVNTEITKAPLSASMIKRYDEHHQDLTLLKALVRQQLPEKYKEIFFDQSKNGYAGYIDGGASQEEFYKFIKPILEKMDGTEELLVKLNREDLLRKQRTFDNGSIPHQIHLGELHAILRRQEDFYPFLKDNREKIEKILTFRIPYYVGPLARGNSRFAWMTRKSEETITPWNFEEVVDKGASAQSFIERMTNFDKNLPNEKVLPKHSLLYEYFTVYNELTKVKYVTEGMRKPAFLSGEQKKAIVDLLFKTNRKVTVKQLKEDYFKKIECFDSVEISGVEDRFNASLGTYHDLLKIIKDKDFLDNEENEDILEDIVLTLTLFEDREMIEERLKTYAHLFDDKVMKQLKRRRYTGWGRLSRKLINGIRDKQSGKTILDFLKSDGFANRNFMQLIHDDSLTFKEDIQKAQVSGQGDSLHEHIANLAGSPAIKKGILQTVKVVDELVKVMGRHKPENIVIEMARENQTTQKGQKNSRERMKRIEEGIKELGSQILKEHPVENTQLQNEKLYLYYLQNGRDMYVDQELDINRLSDYDVDHIVPQSFLKDDSIDNKVLTRSDKARGKSDNVPSEEVVKKMKNYWRQLLNAKLITQRKFDNLTKAERGGLSELDKAGFIKRQLVETRQITKHVAQILDSRMNTKYDENDKLIREVKVITLKSKLVSDFRKDFQFYKVREINNYHHAHDAYLNAVVGTALIKKYPKLESEFVYGDYKVYDVRKMIAKSEQEIGKATAKYFFYSNIMNFFKTEITLANGEIRKRPLIETNGETGEIVWDKGRDFATVRKVLSMPQVNIVKKTEVQTGGFSKESILPKRNSDKLIARKKDWDPKKYGGFDSPTVAYSVLVVAKVEKGKSKKLKSVKELLGITIMERSSFEKNPIDFLEAKGYKEVKKDLIIKLPKYSLFELENGRKRMLASAGELQKGNELALPSKYVNFLYLASHYEKLKGSPEDNEQKQLFVEQHKHYLDEIIEQISEFSKRVILADANLDKVLSAYNKHRDKPIREQAENIIHLFTLTNLGAPAAFKYFDTTIDRKRYTSTKEVLDATLIHQSITGLYETRIDLSQLGGDGGGGSPAPEAAAKGGWVQEISDSRPMLHIYLNGRRFLGLLNTGADKTCIAGRDWPANWPIHQTESSLQGLGMACGVARSSQPLRWQHEDKSGIIHPFVIPTLPFTLWGRDIMKDIKVRLMTDSPDDSQDLMIGAIESNLFADQISWKSDQPVWLNQWPLKQEKLQALQQLVTEQLQLGHLEESNSPWNTPVFVIKKKSGKWRLLQDLRAVNATMHDMGALQPGLPSPVAVPKGWEIIIIDLQDCFFNIKLHPEDCKRFAFSVPSPNFKRPYQRFQWKVLPQGMKNSPTLCQKFVDKAILTVRDKYQDSYIVHYMDDILLAHPSRSIVDEILTSMIQALNKHGLVVSTEKIQKYDNLKYLGTHIQGDSVSYQKLQIRTDKLRTLNDFQKLLGNINWIRPFLKLTTGELKPLFEILNGDSNPISTRKLTPEACKALQLMNERLSTARVKRLDLSQPWSLCILKTEYTPTACLWQDGVVEWIHLPHISPKVITPYDIFCTQLIIKGRHRSKELFSKDPDYIVVPYTKVQFDLLLQEKEDWPISLLGFLGEVHFHLPKDPLLTFTLQTAIIFPHMTSTTPLEKGIVIFTDGSANGRSVTYIQGREPIIKENTQNTAQQAEIVAVITAFEEVSQPFNLYTDSKYVTGLFPEIETATLSPRTKIYTELKHLQRLIHKRQEKFYIGHIRGHTGLPGPLAQGNAYADSLTRILTAGKRTADGSEFEKRTADGSEFESPKKKAKVE

SEQ ID NO: 3179 - protein, 2114 aa, synthetic construct
  source 1..2114: note = Description of Artificial Sequence: Synthetic polypeptide
MPAAKRVKLDGGDKKYSIGLDIGTNSVGWAVITDEYKVPSKKFKVLGNTDRHSIKKNLIGALLFDSGETAEATRLKRTARRRYTRRKNRICYLQEIFSNEMAKVDDSFFHRLEESFLVEEDKKHERHPIFGNIVDEVAYHEKYPTIYHLRKKLVDSTDKADLRLIYLALAHMIKFRGHFLIEGDLNPDNSDVDKLFIQLVQTYNQLFEENPINASGVDAKAILSARLSKSRRLENLIAQLPGEKKNGLFGNLIALSLGLTPNFKSNFDLAEDAKLQLSKDTYDDDLDNLLAQIGDQYADLFLAAKNLSDAILLSDILRVNTEITKAPLSASMIKRYDEHHQDLTLLKALVRQQLPEKYKEIFFDQSKNGYAGYIDGGASQEEFYKFIKPILEKMDGTEELLVKLNREDLLRKQRTFDNGSIPHQIHLGELHAILRRQEDFYPFLKDNREKIEKILTFRIPYYVGPLARGNSRFAWMTRKSEETITPWNFEEVVDKGASAQSFIERMTNFDKNLPNEKVLPKHSLLYEYFTVYNELTKVKYVTEGMRKPAFLSGEQKKAIVDLLFKTNRKVTVKQLKEDYFKKIECFDSVEISGVEDRFNASLGTYHDLLKIIKDKDFLDNEENEDILEDIVLTLTLFEDREMIEERLKTYAHLFDDKVMKQLKRRRYTGWGRLSRKLINGIRDKQSGKTILDFLKSDGFANRNFMQLIHDDSLTFKEDIQKAQVSGQGDSLHEHIANLAGSPAIKKGILQTVKVVDELVKVMGRHKPENIVIEMARENQTTQKGQKNSRERMKRIEEGIKELGSQILKEHPVENTQLQNEKLYLYYLQNGRDMYVDQELDINRLSDYDVDHIVPQSFLKDDSIDNKVLTRSDKARGKSDNVPSEEVVKKMKNYWRQLLNAKLITQRKFDNLTKAERGGLSELDKAGFIKRQLVETRQITKHVAQILDSRMNTKYDENDKLIREVKVITLKSKLVSDFRKDFQFYKVREINNYHHAHDAYLNAVVGTALIKKYPKLESEFVYGDYKVYDVRKMIAKSEQEIGKATAKYFFYSNIMNFFKTEITLANGEIRKRPLIETNGETGEIVWDKGRDFATVRKVLSMPQVNIVKKTEVQTGGFSKESILPKRNSDKLIARKKDWDPKKYGGFDSPTVAYSVLVVAKVEKGKSKKLKSVKELLGITIMERSSFEKNPIDFLEAKGYKEVKKDLIIKLPKYSLFELENGRKRMLASAGELQKGNELALPSKYVNFLYLASHYEKLKGSPEDNEQKQLFVEQHKHYLDEIIEQISEFSKRVILADANLDKVLSAYNKHRDKPIREQAENIIHLFTLTNLGAPAAFKYFDTTIDRKRYTSTKEVLDATLIHQSITGLYETRIDLSQLGGDGGGGSGSSGGGGGWVQEISDSRPMLHIYLNGRRFLGLLNTGADKTCIAGRDWPANWPIHQTESSLQGLGMACGVARSSQPLRWQHEDKSGIIHPFVIPTLPFTLWGRDIMKDIKVRLMTDSPDDSQDLMIGAIESNLFADQISWKSDQPVWLNQWPLKQEKLQALQQLVTEQLQLGHLEESNSPWNTPVFVIKKKSGKWRLLQDLRAVNATMHDMGALQPGLPSPVAVPKGWEIIIIDLQDCFFNIKLHPEDCKRFAFSVPSPNFKRPYQRFQWKVLPQGMKNSPTLCQKFVDKAILTVRDKYQDSYIVHYMDDILLAHPSRSIVDEILTSMIQALNKHGLVVSTEKIQKYDNLKYLGTHIQGDSVSYQKLQIRTDKLRTLNDFQKLLGNINWIRPFLKLTTGELKPLFEILNGDSNPISTRKLTPEACKALQLMNERLSTARVKRLDLSQPWSLCILKTEYTPTACLWQDGVVEWIHLPHISPKVITPYDIFCTQLIIKGRHRSKELFSKDPDYIVVPYTKVQFDLLLQEKEDWPISLLGFLGEVHFHLPKDPLLTFTLQTAIIFPHMTSTTPLEKGIVIFTDGSANGRSVTYIQGREPIIKENTQNTAQQAEIVAVITAFEEVSQPFNLYTDSKYVTGLFPEIETATLSPRTKIYTELKHLQRLIHKRQEKFYIGHIRGHTGLPGPLAQGNAYADSLTRILTAGKRTADGSEFEKRTADGSEFESPKKKAKVE

SEQ ID NO: 3180 - protein, 2114 aa, synthetic construct
  source 1..2114: note = Description of Artificial Sequence: Synthetic polypeptide
MPAAKRVKLDGGDKKYSIGLDIGTNSVGWAVITDEYKVPSKKFKVLGNTDRHSIKKNLIGALLFDSGETAEATRLKRTARRRYTRRKNRICYLQEIFSNEMAKVDDSFFHRLEESFLVEEDKKHERHPIFGNIVDEVAYHEKYPTIYHLRKKLVDSTDKADLRLIYLALAHMIKFRGHFLIEGDLNPDNSDVDKLFIQLVQTYNQLFEENPINASGVDAKAILSARLSKSRRLENLIAQLPGEKKNGLFGNLIALSLGLTPNFKSNFDLAEDAKLQLSKDTYDDDLDNLLAQIGDQYADLFLAAKNLSDAILLSDILRVNTEITKAPLSASMIKRYDEHHQDLTLLKALVRQQLPEKYKEIFFDQSKNGYAGYIDGGASQEEFYKFIKPILEKMDGTEELLVKLNREDLLRKQRTFDNGSIPHQIHLGELHAILRRQEDFYPFLKDNREKIEKILTFRIPYYVGPLARGNSRFAWMTRKSEETITPWNFEEVVDKGASAQSFIERMTNFDKNLPNEKVLPKHSLLYEYFTVYNELTKVKYVTEGMRKPAFLSGEQKKAIVDLLFKTNRKVTVKQLKEDYFKKIECFDSVEISGVEDRFNASLGTYHDLLKIIKDKDFLDNEENEDILEDIVLTLTLFEDREMIEERLKTYAHLFDDKVMKQLKRRRYTGWGRLSRKLINGIRDKQSGKTILDFLKSDGFANRNFMQLIHDDSLTFKEDIQKAQVSGQGDSLHEHIANLAGSPAIKKGILQTVKVVDELVKVMGRHKPENIVIEMARENQTTQKGQKNSRERMKRIEEGIKELGSQILKEHPVENTQLQNEKLYLYYLQNGRDMYVDQELDINRLSDYDVDHIVPQSFLKDDSIDNKVLTRSDKARGKSDNVPSEEVVKKMKNYWRQLLNAKLITQRKFDNLTKAERGGLSELDKAGFIKRQLVETRQITKHVAQILDSRMNTKYDENDKLIREVKVITLKSKLVSDFRKDFQFYKVREINNYHHAHDAYLNAVVGTALIKKYPKLESEFVYGDYKVYDVRKMIAKSEQEIGKATAKYFFYSNIMNFFKTEITLANGEIRKRPLIETNGETGEIVWDKGRDFATVRKVLSMPQVNIVKKTEVQTGGFSKESILPKRNSDKLIARKKDWDPKKYGGFDSPTVAYSVLVVAKVEKGKSKKLKSVKELLGITIMERSSFEKNPIDFLEAKGYKEVKKDLIIKLPKYSLFELENGRKRMLASAGELQKGNELALPSKYVNFLYLASHYEKLKGSPEDNEQKQLFVEQHKHYLDEIIEQISEFSKRVILADANLDKVLSAYNKHRDKPIREQAENIIHLFTLTNLGAPAAFKYFDTTIDRKRYTSTKEVLDATLIHQSITGLYETRIDLSQLGGDGGPAPAPAPAPGGWVQEISDSRPMLHIYLNGRRFLGLLNTGADKTCIAGRDWPANWPIHQTESSLQGLGMACGVARSSQPLRWQHEDKSGIIHPFVIPTLPFTLWGRDIMKDIKVRLMTDSPDDSQDLMIGAIESNLFADQISWKSDQPVWLNQWPLKQEKLQALQQLVTEQLQLGHLEESNSPWNTPVFVIKKKSGKWRLLQDLRAVNATMHDMGALQPGLPSPVAVPKGWEIIIIDLQDCFFNIKLHPEDCKRFAFSVPSPNFKRPYQRFQWKVLPQGMKNSPTLCQKFVDKAILTVRDKYQDSYIVHYMDDILLAHPSRSIVDEILTSMIQALNKHGLVVSTEKIQKYDNLKYLGTHIQGDSVSYQKLQIRTDKLRTLNDFQKLLGNINWIRPFLKLTTGELKPLFEILNGDSNPISTRKLTPEACKALQLMNERLSTARVKRLDLSQPWSLCILKTEYTPTACLWQDGVVEWIHLPHISPKVITPYDIFCTQLIIKGRHRSKELFSKDPDYIVVPYTKVQFDLLLQEKEDWPISLLGFLGEVHFHLPKDPLLTFTLQTAIIFPHMTSTTPLEKGIVIFTDGSANGRSVTYIQGREPIIKENTQNTAQQAEIVAVITAFEEVSQPFNLYTDSKYVTGLFPEIETATLSPRTKIYTELKHLQRLIHKRQEKFYIGHIRGHTGLPGPLAQGNAYADSLTRILTAGKRTADGSEFEKRTADGSEFESPKKKAKVE

SEQ ID NO: 3181 - protein, 2116 aa, synthetic construct
  source 1..2116: note = Description of Artificial Sequence: Synthetic polypeptide
MPAAKRVKLDGGDKKYSIGLDIGTNSVGWAVITDEYKVPSKKFKVLGNTDRHSIKKNLIGALLFDSGETAEATRLKRTARRRYTRRKNRICYLQEIFSNEMAKVDDSFFHRLEESFLVEEDKKHERHPIFGNIVDEVAYHEKYPTIYHLRKKLVDSTDKADLRLIYLALAHMIKFRGHFLIEGDLNPDNSDVDKLFIQLVQTYNQLFEENPINASGVDAKAILSARLSKSRRLENLIAQLPGEKKNGLFGNLIALSLGLTPNFKSNFDLAEDAKLQLSKDTYDDDLDNLLAQIGDQYADLFLAAKNLSDAILLSDILRVNTEITKAPLSASMIKRYDEHHQDLTLLKALVRQQLPEKYKEIFFDQSKNGYAGYIDGGASQEEFYKFIKPILEKMDGTEELLVKLNREDLLRKQRTFDNGSIPHQIHLGELHAILRRQEDFYPFLKDNREKIEKILTFRIPYYVGPLARGNSRFAWMTRKSEETITPWNFEEVVDKGASAQSFIERMTNFDKNLPNEKVLPKHSLLYEYFTVYNELTKVKYVTEGMRKPAFLSGEQKKAIVDLLFKTNRKVTVKQLKEDYFKKIECFDSVEISGVEDRFNASLGTYHDLLKIIKDKDFLDNEENEDILEDIVLTLTLFEDREMIEERLKTYAHLFDDKVMKQLKRRRYTGWGRLSRKLINGIRDKQSGKTILDFLKSDGFANRNFMQLIHDDSLTFKEDIQKAQVSGQGDSLHEHIANLAGSPAIKKGILQTVKVVDELVKVMGRHKPENIVIEMARENQTTQKGQKNSRERMKRIEEGIKELGSQILKEHPVENTQLQNEKLYLYYLQNGRDMYVDQELDINRLSDYDVDHIVPQSFLKDDSIDNKVLTRSDKARGKSDNVPSEEVVKKMKNYWRQLLNAKLITQRKFDNLTKAERGGLSELDKAGFIKRQLVETRQITKHVAQILDSRMNTKYDENDKLIREVKVITLKSKLVSDFRKDFQFYKVREINNYHHAHDAYLNAVVGTALIKKYPKLESEFVYGDYKVYDVRKMIAKSEQEIGKATAKYFFYSNIMNFFKTEITLANGEIRKRPLIETNGETGEIVWDKGRDFATVRKVLSMPQVNIVKKTEVQTGGFSKESILPKRNSDKLIARKKDWDPKKYGGFDSPTVAYSVLVVAKVEKGKSKKLKSVKELLGITIMERSSFEKNPIDFLEAKGYKEVKKDLIIKLPKYSLFELENGRKRMLASAGELQKGNELALPSKYVNFLYLASHYEKLKGSPEDNEQKQLFVEQHKHYLDEIIEQISEFSKRVILADANLDKVLSAYNKHRDKPIREQAENIIHLFTLTNLGAPAAFKYFDTTIDRKRYTSTKEVLDATLIHQSITGLYETRIDLSQLGGDGGGSSGGGEAAAKGGWVQEISDSRPMLHIYLNGRRFLGLLNTGADKTCIAGRDWPANWPIHQTESSLQGLGMACGVARSSQPLRWQHEDKSGIIHPFVIPTLPFTLWGRDIMKDIKVRLMTDSPDDSQDLMIGAIESNLFADQISWKSDQPVWLNQWPLKQEKLQALQQLVTEQLQLGHLEESNSPWNTPVFVIKKKSGKWRLLQDLRAVNATMHDMGALQPGLPSPVAVPKGWEIIIIDLQDCFFNIKLHPEDCKRFAFSVPSPNFKRPYQRFQWKVLPQGMKNSPTLCQKFVDKAILTVRDKYQDSYIVHYMDDILLAHPSRSIVDEILTSMIQALNKHGLVVSTEKIQKYDNLKYLGTHIQGDSVSYQKLQIRTDKLRTLNDFQKLLGNINWIRPFLKLTTGELKPLFEILNGDSNPISTRKLTPEACKALQLMNERLSTARVKRLDLSQPWSLCILKTEYTPTACLWQDGVVEWIHLPHISPKVITPYDIFCTQLIIKGRHRSKELFSKDPDYIVVPYTKVQFDLLLQEKEDWPISLLGFLGEVHFHLPKDPLLTFTLQTAIIFPHMTSTTPLEKGIVIFTDGSANGRSVTYIQGREPIIKENTQNTAQQAEIVAVITAFEEVSQPFNLYTDSKYVTGLFPEIETATLSPRTKIYTELKHLQRLIHKRQEKFYIGHIRGHTGLPGPLAQGNAYADSLTRILTAGKRTADGSEFEKRTADGSEFESPKKKAKVE

SEQ ID NO: 3182 - protein, 2116 aa, synthetic construct
  source 1..2116: note = Description of Artificial Sequence: Synthetic polypeptide
MPAAKRVKLDGGDKKYSIGLDIGTNSVGWAVITDEYKVPSKKFKVLGNTDRHSIKKNLIGALLFDSGETAEATRLKRTARRRYTRRKNRICYLQEIFSNEMAKVDDSFFHRLEESFLVEEDKKHERHPIFGNIVDEVAYHEKYPTIYHLRKKLVDSTDKADLRLIYLALAHMIKFRGHFLIEGDLNPDNSDVDKLFIQLVQTYNQLFEENPINASGVDAKAILSARLSKSRRLENLIAQLPGEKKNGLFGNLIALSLGLTPNFKSNFDLAEDAKLQLSKDTYDDDLDNLLAQIGDQYADLFLAAKNLSDAILLSDILRVNTEITKAPLSASMIKRYDEHHQDLTLLKALVRQQLPEKYKEIFFDQSKNGYAGYIDGGASQEEFYKFIKPILEKMDGTEELLVKLNREDLLRKQRTFDNGSIPHQIHLGELHAILRRQEDFYPFLKDNREKIEKILTFRIPYYVGPLARGNSRFAWMTRKSEETITPWNFEEVVDKGASAQSFIERMTNFDKNLPNEKVLPKHSLLYEYFTVYNELTKVKYVTEGMRKPAFLSGEQKKAIVDLLFKTNRKVTVKQLKEDYFKKIECFDSVEISGVEDRFNASLGTYHDLLKIIKDKDFLDNEENEDILEDIVLTLTLFEDREMIEERLKTYAHLFDDKVMKQLKRRRYTGWGRLSRKLINGIRDKQSGKTILDFLKSDGFANRNFMQLIHDDSLTFKEDIQKAQVSGQGDSLHEHIANLAGSPAIKKGILQTVKVVDELVKVMGRHKPENIVIEMARENQTTQKGQKNSRERMKRIEEGIKELGSQILKEHPVENTQLQNEKLYLYYLQNGRDMYVDQELDINRLSDYDVDHIVPQSFLKDDSIDNKVLTRSDKARGKSDNVPSEEVVKKMKNYWRQLLNAKLITQRKFDNLTKAERGGLSELDKAGFIKRQLVETRQITKHVAQILDSRMNTKYDENDKLIREVKVITLKSKLVSDFRKDFQFYKVREINNYHHAHDAYLNAVVGTALIKKYPKLESEFVYGDYKVYDVRKMIAKSEQEIGKATAKYFFYSNIMNFFKTEITLANGEIRKRPLIETNGETGEIVWDKGRDFATVRKVLSMPQVNIVKKTEVQTGGFSKESILPKRNSDKLIARKKDWDPKKYGGFDSPTVAYSVLVVAKVEKGKSKKLKSVKELLGITIMERSSFEKNPIDFLEAKGYKEVKKDLIIKLPKYSLFELENGRKRMLASAGELQKGNELALPSKYVNFLYLASHYEKLKGSPEDNEQKQLFVEQHKHYLDEIIEQISEFSKRVILADANLDKVLSAYNKHRDKPIREQAENIIHLFTLTNLGAPAAFKYFDTTIDRKRYTSTKEVLDATLIHQSITGLYETRIDLSQLGGDGGGSSEAAAKPAPGGWVQEISDSRPMLHIYLNGRRFLGLLNTGADKTCIAGRDWPANWPIHQTESSLQGLGMACGVARSSQPLRWQHEDKSGIIHPFVIPTLPFTLWGRDIMKDIKVRLMTDSPDDSQDLMIGAIESNLFADQISWKSDQPVWLNQWPLKQEKLQALQQLVTEQLQLGHLEESNSPWNTPVFVIKKKSGKWRLLQDLRAVNATMHDMGALQPGLPSPVAVPKGWEIIIIDLQDCFFNIKLHPEDCKRFAFSVPSPNFKRPYQRFQWKVLPQGMKNSPTLCQKFVDKAILTVRDKYQDSYIVHYMDDILLAHPSRSIVDEILTSMIQALNKHGLVVSTEKIQKYDNLKYLGTHIQGDSVSYQKLQIRTDKLRTLNDFQKLLGNINWIRPFLKLTTGELKPLFEILNGDSNPISTRKLTPEACKALQLMNERLSTARVKRLDLSQPWSLCILKTEYTPTACLWQDGVVEWIHLPHISPKVITPYDIFCTQLIIKGRHRSKELFSKDPDYIVVPYTKVQFDLLLQEKEDWPISLLGFLGEVHFHLPKDPLLTFTLQTAIIFPHMTSTTPLEKGIVIFTDGSANGRSVTYIQGREPIIKENTQNTAQQAEIVAVITAFEEVSQPFNLYTDSKYVTGLFPEIETATLSPRTKIYTELKHLQRLIHKRQEKFYIGHIRGHTGLPGPLAQGNAYADSLTRILTAGKRTADGSEFEKRTADGSEFESPKKKAKVE

SEQ ID NO: 3183 - protein, 2111 aa, synthetic construct
  source 1..2111: note = Description of Artificial Sequence: Synthetic polypeptide
MPAAKRVKLDGGDKKYSIGLDIGTNSVGWAVITDEYKVPSKKFKVLGNTDRHSIKKNLIGALLFDSGETAEATRLKRTARRRYTRRKNRICYLQEIFSNEMAKVDDSFFHRLEESFLVEEDKKHERHPIFGNIVDEVAYHEKYPTIYHLRKKLVDSTDKADLRLIYLALAHMIKFRGHFLIEGDLNPDNSDVDKLFIQLVQTYNQLFEENPINASGVDAKAILSARLSKSRRLENLIAQLPGEKKNGLFGNLIALSLGLTPNFKSNFDLAEDAKLQLSKDTYDDDLDNLLAQIGDQYADLFLAAKNLSDAILLSDILRVNTEITKAPLSASMIKRYDEHHQDLTLLKALVRQQLPEKYKEIFFDQSKNGYAGYIDGGASQEEFYKFIKPILEKMDGTEELLVKLNREDLLRKQRTFDNGSIPHQIHLGELHAILRRQEDFYPFLKDNREKIEKILTFRIPYYVGPLARGNSRFAWMTRKSEETITPWNFEEVVDKGASAQSFIERMTNFDKNLPNEKVLPKHSLLYEYFTVYNELTKVKYVTEGMRKPAFLSGEQKKAIVDLLFKTNRKVTVKQLKEDYFKKIECFDSVEISGVEDRFNASLGTYHDLLKIIKDKDFLDNEENEDILEDIVLTLTLFEDREMIEERLKTYAHLFDDKVMKQLKRRRYTGWGRLSRKLINGIRDKQSGKTILDFLKSDGFANRNFMQLIHDDSLTFKEDIQKAQVSGQGDSLHEHIANLAGSPAIKKGILQTVKVVDELVKVMGRHKPENIVIEMARENQTTQKGQKNSRERMKRIEEGIKELGSQILKEHPVENTQLQNEKLYLYYLQNGRDMYVDQELDINRLSDYDVDHIVPQSFLKDDSIDNKVLTRSDKARGKSDNVPSEEVVKKMKNYWRQLLNAKLITQRKFDNLTKAERGGLSELDKAGFIKRQLVETRQITKHVAQILDSRMNTKYDENDKLIREVKVITLKSKLVSDFRKDFQFYKVREINNYHHAHDAYLNAVVGTALIKKYPKLESEFVYGDYKVYDVRKMIAKSEQEIGKATAKYFFYSNIMNFFKTEITLANGEIRKRPLIETNGETGEIVWDKGRDFATVRKVLSMPQVNIVKKTEVQTGGFSKESILPKRNSDKLIARKKDWDPKKYGGFDSPTVAYSVLVVAKVEKGKSKKLKSVKELLGITIMERSSFEKNPIDFLEAKGYKEVKKDLIIKLPKYSLFELENGRKRMLASAGELQKGNELALPSKYVNFLYLASHYEKLKGSPEDNEQKQLFVEQHKHYLDEIIEQISEFSKRVILADANLDKVLSAYNKHRDKPIREQAENIIHLFTLTNLGAPAAFKYFDTTIDRKRYTSTKEVLDATLIHQSITGLYETRIDLSQLGGDGGGGSGSSGGWVQEISDSRPMLHIYLNGRRFLGLLNTGADKTCIAGRDWPANWPIHQTESSLQGLGMACGVARSSQPLRWQHEDKSGIIHPFVIPTLPFTLWGRDIMKDIKVRLMTDSPDDSQDLMIGAIESNLFADQISWKSDQPVWLNQWPLKQEKLQALQQLVTEQLQLGHLEESNSPWNTPVFVIKKKSGKWRLLQDLRAVNATMHDMGALQPGLPSPVAVPKGWEIIIIDLQDCFFNIKLHPEDCKRFAFSVPSPNFKRPYQRFQWKVLPQGMKNSPTLCQKFVDKAILTVRDKYQDSYIVHYMDDILLAHPSRSIVDEILTSMIQALNKHGLVVSTEKIQKYDNLKYLGTHIQGDSVSYQKLQIRTDKLRTLNDFQKLLGNINWIRPFLKLTTGELKPLFEILNGDSNPISTRKLTPEACKALQLMNERLSTARVKRLDLSQPWSLCILKTEYTPTACLWQDGVVEWIHLPHISPKVITPYDIFCTQLIIKGRHRSKELFSKDPDYIVVPYTKVQFDLLLQEKEDWPISLLGFLGEVHFHLPKDPLLTFTLQTAIIFPHMTSTTPLEKGIVIFTDGSANGRSVTYIQGREPIIKENTQNTAQQAEIVAVITAFEEVSQPFNLYTDSKYVTGLFPEIETATLSPRTKIYTELKHLQRLIHKRQEKFYIGHIRGHTGLPGPLAQGNAYADSLTRILTAGKRTADGSEFEKRTADGSEFESPKKKAKVE

SEQ ID NO: 3184 - protein, 2114 aa, synthetic construct
  source 1..2114: note = Description of Artificial Sequence: Synthetic polypeptide
MPAAKRVKLDGGDKKYSIGLDIGTNSVGWAVITDEYKVPSKKFKVLGNTDRHSIKKNLIGALLFDSGETAEATRLKRTARRRYTRRKNRICYLQEIFSNEMAKVDDSFFHRLEESFLVEEDKKHERHPIFGNIVDEVAYHEKYPTIYHLRKKLVDSTDKADLRLIYLALAHMIKFRGHFLIEGDLNPDNSDVDKLFIQLVQTYNQLFEENPINASGVDAKAILSARLSKSRRLENLIAQLPGEKKNGLFGNLIALSLGLTPNFKSNFDLAEDAKLQLSKDTYDDDLDNLLAQIGDQYADLFLAAKNLSDAILLSDILRVNTEITKAPLSASMIKRYDEHHQDLTLLKALVRQQLPEKYKEIFFDQSKNGYAGYIDGGASQEEFYKFIKPILEKMDGTEELLVKLNREDLLRKQRTFDNGSIPHQIHLGELHAILRRQEDFYPFLKDNREKIEKILTFRIPYYVGPLARGNSRFAWMTRKSEETITPWNFEEVVDKGASAQSFIERMTNFDKNLPNEKVLPKHSLLYEYFTVYNELTKVKYVTEGMRKPAFLSGEQKKAIVDLLFKTNRKVTVKQLKEDYFKKIECFDSVEISGVEDRFNASLGTYHDLLKIIKDKDFLDNEENEDILEDIVLTLTLFEDREMIEERLKTYAHLFDDKVMKQLKRRRYTGWGRLSRKLINGIRDKQSGKTILDFLKSDGFANRNFMQLIHDDSLTFKEDIQKAQVSGQGDSLHEHIANLAGSPAIKKGILQTVKVVDELVKVMGRHKPENIVIEMARENQTTQKGQKNSRERMKRIEEGIKELGSQILKEHPVENTQLQNEKLYLYYLQNGRDMYVDQELDINRLSDYDVDHIVPQSFLKDDSIDNKVLTRSDKARGKSDNVPSEEVVKKMKNYWRQLLNAKLITQRKFDNLTKAERGGLSELDKAGFIKRQLVETRQITKHVAQILDSRMNTKYDENDKLIREVKVITLKSKLVSDFRKDFQFYKVREINNYHHAHDAYLNAVVGTALIKKYPKLESEFVYGDYKVYDVRKMIAKSEQEIGKATAKYFFYSNIMNFFKTEITLANGEIRKRPLIETNGETGEIVWDKGRDFATVRKVLSMPQVNIVKKTEVQTGGFSKESILPKRNSDKLIARKKDWDPKKYGGFDSPTVAYSVLVVAKVEKGKSKKLKSVKELLGITIMERSSFEKNPIDFLEAKGYKEVKKDLIIKLPKYSLFELENGRKRMLASAGELQKGNELALPSKYVNFLYLASHYEKLKGSPEDNEQKQLFVEQHKHYLDEIIEQISEFSKRVILADANLDKVLSAYNKHRDKPIREQAENIIHLFTLTNLGAPAAFKYFDTTIDRKRYTSTKEVLDATLIHQSITGLYETRIDLSQLGGDGGGGGGSSGGSGGWVQEISDSRPMLHIYLNGRRFLGLLNTGADKTCIAGRDWPANWPIHQTESSLQGLGMACGVARSSQPLRWQHEDKSGIIHPFVIPTLPFTLWGRDIMKDIKVRLMTDSPDDSQDLMIGAIESNLFADQISWKSDQPVWLNQWPLKQEKLQALQQLVTEQLQLGHLEESNSPWNTPVFVIKKKSGKWRLLQDLRAVNATMHDMGALQPGLPSPVAVPKGWEIIIIDLQDCFFNIKLHPEDCKRFAFSVPSPNFKRPYQRFQWKVLPQGMKNSPTLCQKFVDKAILTVRDKYQDSYIVHYMDDILLAHPSRSIVDEILTSMIQALNKHGLVVSTEKIQKYDNLKYLGTHIQGDSVSYQKLQIRTDKLRTLNDFQKLLGNINWIRPFLKLTTGELKPLFEILNGDSNPISTRKLTPEACKALQLMNERLSTARVKRLDLSQPWSLCILKTEYTPTACLWQDGVVEWIHLPHISPKVITPYDIFCTQLIIKGRHRSKELFSKDPDYIVVPYTKVQFDLLLQEKEDWPISLLGFLGEVHFHLPKDPLLTFTLQTAIIFPHMTSTTPLEKGIVIFTDGSANGRSVTYIQGREPIIKENTQNTAQQAEIVAVITAFEEVSQPFNLYTDSKYVTGLFPEIETATLSPRTKIYTELKHLQRLIHKRQEKFYIGHIRGHTGLPGPLAQGNAYADSLTRILTAGKRTADGSEFEKRTADGSEFESPKKKAKVE

SEQ ID NO: 3185 - protein, 2120 aa, synthetic construct
  source 1..2120: note = Description of Artificial Sequence: Synthetic polypeptide
MPAAKRVKLDGGDKKYSIGLDIGTNSVGWAVITDEYKVPSKKFKVLGNTDRHSIKKNLIGALLFDSGETAEATRLKRTARRRYTRRKNRICYLQEIFSNEMAKVDDSFFHRLEESFLVEEDKKHERHPIFGNIVDEVAYHEKYPTIYHLRKKLVDSTDKADLRLIYLALAHMIKFRGHFLIEGDLNPDNSDVDKLFIQLVQTYNQLFEENPINASGVDAKAILSARLSKSRRLENLIAQLPGEKKNGLFGNLIALSLGLTPNFKSNFDLAEDAKLQLSKDTYDDDLDNLLAQIGDQYADLFLAAKNLSDAILLSDILRVNTEITKAPLSASMIKRYDEHHQDLTLLKALVRQQLPEKYKEIFFDQSKNGYAGYIDGGASQEEFYKFIKPILEKMDGTEELLVKLNREDLLRKQRTFDNGSIPHQIHLGELHAILRRQEDFYPFLKDNREKIEKILTFRIPYYVGPLARGNSRFAWMTRKSEETITPWNFEEVVDKGASAQSFIERMTNFDKNLPNEKVLPKHSLLYEYFTVYNELTKVKYVTEGMRKPAFLSGEQKKAIVDLLFKTNRKVTVKQLKEDYFKKIECFDSVEISGVEDRFNASLGTYHDLLKIIKDKDFLDNEENEDILEDIVLTLTLFEDREMIEERLKTYAHLFDDKVMKQLKRRRYTGWGRLSRKLINGIRDKQSGKTILDFLKSDGFANRNFMQLIHDDSLTFKEDIQKAQVSGQGDSLHEHIANLAGSPAIKKGILQTVKVVDELVKVMGRHKPENIVIEMARENQTTQKGQKNSRERMKRIEEGIKELGSQILKEHPVENTQLQNEKLYLYYLQNGRDMYVDQELDINRLSDYDVDHIVPQSFLKDDSIDNKVLTRSDKARGKSDNVPSEEVVKKMKNYWRQLLNAKLITQRKFDNLTKAERGGLSELDKAGFIKRQLVETRQITKHVAQILDSRMNTKYDENDKLIREVKVITLKSKLVSDFRKDFQFYKVREINNYHHAHDAYLNAVVGTALIKKYPKLESEFVYGDYKVYDVRKMIAKSEQEIGKATAKYFFYSNIMNFFKTEITLANGEIRKRPLIETNGETGEIVWDKGRDFATVRKVLSMPQVNIVKKTEVQTGGFSKESILPKRNSDKLIARKKDWDPKKYGGFDSPTVAYSVLVVAKVEKGKSKKLKSVKELLGITIMERSSFEKNPIDFLEAKGYKEVKKDLIIKLPKYSLFELENGRKRMLASAGELQKGNELALPSKYVNFLYLASHYEKLKGSPEDNEQKQLFVEQHKHYLDEIIEQISEFSKRVILADANLDKVLSAYNKHRDKPIREQAENIIHLFTLTNLGAPAAFKYFDTTIDRKRYTSTKEVLDATLIHQSITGLYETRIDLSQLGGDGGEAAAKGGGGSEAAAKGGWVQEISDSRPMLHIYLNGRRFLGLLNTGADKTCIAGRDWPANWPIHQTESSLQGLGMACGVARSSQPLRWQHEDKSGIIHPFVIPTLPFTLWGRDIMKDIKVRLMTDSPDDSQDLMIGAIESNLFADQISWKSDQPVWLNQWPLKQEKLQALQQLVTEQLQLGHLEESNSPWNTPVFVIKKKSGKWRLLQDLRAVNATMHDMGALQPGLPSPVAVPKGWEIIIIDLQDCFFNIKLHPEDCKRFAFSVPSPNFKRPYQRFQWKVLPQGMKNSPTLCQKFVDKAILTVRDKYQDSYIVHYMDDILLAHPSRSIVDEILTSMIQALNKHGLVVSTEKIQKYDNLKYLGTHIQGDSVSYQKLQIRTDKLRTLNDFQKLLGNINWIRPFLKLTTGELKPLFEILNGDSNPISTRKLTPEACKALQLMNERLSTARVKRLDLSQPWSLCILKTEYTPTACLWQDGVVEWIHLPHISPKVITPYDIFCTQLIIKGRHRSKELFSKDPDYIVVPYTKVQFDLLLQEKEDWPISLLGFLGEVHFHLPKDPLLTFTLQTAIIFPHMTSTTPLEKGIVIFTDGSANGRSVTYIQGREPIIKENTQNTAQQAEIVAVITAFEEVSQPFNLYTDSKYVTGLFPEIETATLSPRTKIYTELKHLQRLIHKRQEKFYIGHIRGHTGLPGPLAQGNAYADSLTRILTAGKRTADGSEFEKRTADGSEFESPKKKAKVE

SEQ ID NO: 3186 - protein, 2108 aa, synthetic construct
  source 1..2108: note = Description of Artificial Sequence: Synthetic polypeptide
MPAAKRVKLDGGDKKYSIGLDIGTNSVGWAVITDEYKVPSKKFKVLGNTDRHSIKKNLIGALLFDSGETAEATRLKRTARRRYTRRKNRICYLQEIFSNEMAKVDDSFFHRLEESFLVEEDKKHERHPIFGNIVDEVAYHEKYPTIYHLRKKLVDSTDKADLRLIYLALAHMIKFRGHFLIEGDLNPDNSDVDKLFIQLVQTYNQLFEENPINASGVDAKAILSARLSKSRRLENLIAQLPGEKKNGLFGNLIALSLGLTPNFKSNFDLAEDAKLQLSKDTYDDDLDNLLAQIGDQYADLFLAAKNLSDAILLSDILRVNTEITKAPLSASMIKRYDEHHQDLTLLKALVRQQLPEKYKEIFFDQSKNGYAGYIDGGASQEEFYKFIKPILEKMDGTEELLVKLNREDLLRKQRTFDNGSIPHQIHLGELHAILRRQEDFYPFLKDNREKIEKILTFRIPYYVGPLARGNSRFAWMTRKSEETITPWNFEEVVDKGASAQSFIERMTNFDKNLPNEKVLPKHSLLYEYFTVYNELTKVKYVTEGMRKPAFLSGEQKKAIVDLLFKTNRKVTVKQLKEDYFKKIECFDSVEISGVEDRFNASLGTYHDLLKIIKDKDFLDNEENEDILEDIVLTLTLFEDREMIEERLKTYAHLFDDKVMKQLKRRRYTGWGRLSRKLINGIRDKQSGKTILDFLKSDGFANRNFMQLIHDDSLTFKEDIQKAQVSGQGDSLHEHIANLAGSPAIKKGILQTVKVVDELVKVMGRHKPENIVIEMARENQTTQKGQKNSRERMKRIEEGIKELGSQILKEHPVENTQLQNEKLYLYYLQNGRDMYVDQELDINRLSDYDVDHIVPQSFLKDDSIDNKVLTRSDKARGKSDNVPSEEVVKKMKNYWRQLLNAKLITQRKFDNLTKAERGGLSELDKAGFIKRQLVETRQITKHVAQILDSRMNTKYDENDKLIREVKVITLKSKLVSDFRKDFQFYKVREINNYHHAHDAYLNAVVGTALIKKYPKLESEFVYGDYKVYDVRKMIAKSEQEIGKATAKYFFYSNIMNFFKTEITLANGEIRKRPLIETNGETGEIVWDKGRDFATVRKVLSMPQVNIVKKTEVQTGGFSKESILPKRNSDKLIARKKDWDPKKYGGFDSPTVAYSVLVVAKVEKGKSKKLKSVKELLGITIMERSSFEKNPIDFLEAKGYKEVKKDLIIKLPKYSLFELENGRKRMLASAGELQKGNELALPSKYVNFLYLASHYEKLKGSPEDNEQKQLFVEQHKHYLDEIIEQISEFSKRVILADANLDKVLSAYNKHRDKPIREQAENIIHLFTLTNLGAPAAFKYFDTTIDRKRYTSTKEVLDATLIHQSITGLYETRIDLSQLGGDGGGGSGGWVQEISDSRPMLHIYLNGRRFLGLLNTGADKTCIAGRDWPANWPIHQTESSLQGLGMACGVARSSQPLRWQHEDKSGIIHPFVIPTLPFTLWGRDIMKDIKVRLMTDSPDDSQDLMIGAIESNLFADQISWKSDQPVWLNQWPLKQEKLQALQQLVTEQLQLGHLEESNSPWNTPVFVIKKKSGKWRLLQDLRAVNATMHDMGALQPGLPSPVAVPKGWEIIIIDLQDCFFNIKLHPEDCKRFAFSVPSPNFKRPYQRFQWKVLPQGMKNSPTLCQKFVDKAILTVRDKYQDSYIVHYMDDILLAHPSRSIVDEILTSMIQALNKHGLVVSTEKIQKYDNLKYLGTHIQGDSVSYQKLQIRTDKLRTLNDFQKLLGNINWIRPFLKLTTGELKPLFEILNGDSNPISTRKLTPEACKALQLMNERLSTARVKRLDLSQPWSLCILKTEYTPTACLWQDGVVEWIHLPHISPKVITPYDIFCTQLIIKGRHRSKELFSKDPDYIVVPYTKVQFDLLLQEKEDWPISLLGFLGEVHFHLPKDPLLTFTLQTAIIFPHMTSTTPLEKGIVIFTDGSANGRSVTYIQGREPIIKENTQNTAQQAEIVAVITAFEEVSQPFNLYTDSKYVTGLFPEIETATLSPRTKIYTELKHLQRLIHKRQEKFYIGHIRGHTGLPGPLAQGNAYADSLTRILTAGKRTADGSEFEKRTADGSEFESPKKKAKVE

SEQ ID NO: 3187 - protein, 2114 aa, synthetic construct
  source 1..2114: note = Description of Artificial Sequence: Synthetic polypeptide
MPAAKRVKLDGGDKKYSIGLDIGTNSVGWAVITDEYKVPSKKFKVLGNTDRHSIKKNLIGALLFDSGETAEATRLKRTARRRYTRRKNRICYLQEIFSNEMAKVDDSFFHRLEESFLVEEDKKHERHPIFGNIVDEVAYHEKYPTIYHLRKKLVDSTDKADLRLIYLALAHMIKFRGHFLIEGDLNPDNSDVDKLFIQLVQTYNQLFEENPINASGVDAKAILSARLSKSRRLENLIAQLPGEKKNGLFGNLIALSLGLTPNFKSNFDLAEDAKLQLSKDTYDDDLDNLLAQIGDQYADLFLAAKNLSDAILLSDILRVNTEITKAPLSASMIKRYDEHHQDLTLLKALVRQQLPEKYKEIFFDQSKNGYAGYIDGGASQEEFYKFIKPILEKMDGTEELLVKLNREDLLRKQRTFDNGSIPHQIHLGELHAILRRQEDFYPFLKDNREKIEKILTFRIPYYVGPLARGNSRFAWMTRKSEETITPWNFEEVVDKGASAQSFIERMTNFDKNLPNEKVLPKHSLLYEYFTVYNELTKVKYVTEGMRKPAFLSGEQKKAIVDLLFKTNRKVTVKQLKEDYFKKIECFDSVEISGVEDRFNASLGTYHDLLKIIKDKDFLDNEENEDILEDIVLTLTLFEDREMIEERLKTYAHLFDDKVMKQLKRRRYTGWGRLSRKLINGIRDKQSGKTILDFLKSDGFANRNFMQLIHDDSLTFKEDIQKAQVSGQGDSLHEHIANLAGSPAIKKGILQTVKVVDELVKVMGRHKPENIVIEMARENQTTQKGQKNSRERMKRIEEGIKELGSQILKEHPVENTQLQNEKLYLYYLQNGRDMYVDQELDINRLSDYDVDHIVPQSFLKDDSIDNKVLTRSDKARGKSDNVPSEEVVKKMKNYWRQLLNAKLITQRKFDNLTKAERGGLSELDKAGFIKRQLVETRQITKHVAQILDSRMNTKYDENDKLIREVKVITLKSKLVSDFRKDFQFYKVREINNYHHAHDAYLNAVVGTALIKKYPKLESEFVYGDYKVYDVRKMIAKSEQEIGKATAKYFFYSNIMNFFKTEITLANGEIRKRPLIETNGETGEIVWDKGRDFATVRKVLSMPQVNIVKKTEVQTGGFSKESILPKRNSDKLIARKKDWDPKKYGGFDSPTVAYSVLVVAKVEKGKSKKLKSVKELLGITIMERSSFEKNPIDFLEAKGYKEVKKDLIIKLPKYSLFELENGRKRMLASAGELQKGNELALPSKYVNFLYLASHYEKLKGSPEDNEQKQLFVEQHKHYLDEIIEQISEFSKRVILADANLDKVLSAYNKHRDKPIREQAENIIHLFTLTNLGAPAAFKYFDTTIDRKRYTSTKEVLDATLIHQSITGLYETRIDLSQLGGDGGGSSPAPGGGGGWVQEISDSRPMLHIYLNGRRFLGLLNTGADKTCIAGRDWPANWPIHQTESSLQGLGMACGVARSSQPLRWQHEDKSGIIHPFVIPTLPFTLWGRDIMKDIKVRLMTDSPDDSQDLMIGAIESNLFADQISWKSDQPVWLNQWPLKQEKLQALQQLVTEQLQLGHLEESNSPWNTPVFVIKKKSGKWRLLQDLRAVNATMHDMGALQPGLPSPVAVPKGWEIIIIDLQDCFFNIKLHPEDCKRFAFSVPSPNFKRPYQRFQWKVLPQGMKNSPTLCQKFVDKAILTVRDKYQDSYIVHYMDDILLAHPSRSIVDEILTSMIQALNKHGLVVSTEKIQKYDNLKYLGTHIQGDSVSYQKLQIRTDKLRTLNDFQKLLGNINWIRPFLKLTTGELKPLFEILNGDSNPISTRKLTPEACKALQLMNERLSTARVKRLDLSQPWSLCILKTEYTPTACLWQDGVVEWIHLPHISPKVITPYDIFCTQLIIKGRHRSKELFSKDPDYIVVPYTKVQFDLLLQEKEDWPISLLGFLGEVHFHLPKDPLLTFTLQTAIIFPHMTSTTPLEKGIVIFTDGSANGRSVTYIQGREPIIKENTQNTAQQAEIVAVITAFEEVSQPFNLYTDSKYVTGLFPEIETATLSPRTKIYTELKHLQRLIHKRQEKFYIGHIRGHTGLPGPLAQGNAYADSLTRILTAGKRTADGSEFEKRTADGSEFESPKKKAKVE

SEQ ID NO: 3188 - protein, 2114 aa, synthetic construct
  source 1..2114: note = Description of Artificial Sequence: Synthetic polypeptide
MPAAKRVKLDGGDKKYSIGLDIGTNSVGWAVITDEYKVPSKKFKVLGNTDRHSIKKNLIGALLFDSGETAEATRLKRTARRRYTRRKNRICYLQEIFSNEMAKVDDSFFHRLEESFLVEEDKKHERHPIFGNIVDEVAYHEKYPTIYHLRKKLVDSTDKADLRLIYLALAHMIKFRGHFLIEGDLNPDNSDVDKLFIQLVQTYNQLFEENPINASGVDAKAILSARLSKSRRLENLIAQLPGEKKNGLFGNLIALSLGLTPNFKSNFDLAEDAKLQLSKDTYDDDLDNLLAQIGDQYADLFLAAKNLSDAILLSDILRVNTEITKAPLSASMIKRYDEHHQDLTLLKALVRQQLPEKYKEIFFDQSKNGYAGYIDGGASQEEFYKFIKPILEKMDGTEELLVKLNREDLLRKQRTFDNGSIPHQIHLGELHAILRRQEDFYPFLKDNREKIEKILTFRIPYYVGPLARGNSRFAWMTRKSEETITPWNFEEVVDKGASAQSFIERMTNFDKNLPNEKVLPKHSLLYEYFTVYNELTKVKYVTEGMRKPAFLSGEQKKAIVDLLFKTNRKVTVKQLKEDYFKKIECFDSVEISGVEDRFNASLGTYHDLLKIIKDKDFLDNEENEDILEDIVLTLTLFEDREMIEERLKTYAHLFDDKVMKQLKRRRYTGWGRLSRKLINGIRDKQSGKTILDFLKSDGFANRNFMQLIHDDSLTFKEDIQKAQVSGQGDSLHEHIANLAGSPAIKKGILQTVKVVDELVKVMGRHKPENIVIEMARENQTTQKGQKNSRERMKRIEEGIKELGSQILKEHPVENTQLQNEKLYLYYLQNGRDMYVDQELDINRLSDYDVDHIVPQSFLKDDSIDNKVLTRSDKARGKSDNVPSEEVVKKMKNYWRQLLNAKLITQRKFDNLTKAERGGLSELDKAGFIKRQLVETRQITKHVAQILDSRMNTKYDENDKLIREVKVITLKSKLVSDFRKDFQFYKVREINNYHHAHDAYLNAVVGTALIKKYPKLESEFVYGDYKVYDVRKMIAKSEQEIGKATAKYFFYSNIMNFFKTEITLANGEIRKRPLIETNGETGEIVWDKGRDFATVRKVLSMPQVNIVKKTEVQTGGFSKESILPKRNSDKLIARKKDWDPKKYGGFDSPTVAYSVLVVAKVEKGKSKKLKSVKELLGITIMERSSFEKNPIDFLEAKGYKEVKKDLIIKLPKYSLFELENGRKRMLASAGELQKGNELALPSKYVNFLYLASHYEKLKGSPEDNEQKQLFVEQHKHYLDEIIEQISEFSKRVILADANLDKVLSAYNKHRDKPIREQAENIIHLFTLTNLGAPAAFKYFDTTIDRKRYTSTKEVLDATLIHQSITGLYETRIDLSQLGGDGGPAPGSSGGGGGWVQEISDSRPMLHIYLNGRRFLGLLNTGADKTCIAGRDWPANWPIHQTESSLQGLGMACGVARSSQPLRWQHEDKSGIIHPFVIPTLPFTLWGRDIMKDIKVRLMTDSPDDSQDLMIGAIESNLFADQISWKSDQPVWLNQWPLKQEKLQALQQLVTEQLQLGHLEESNSPWNTPVFVIKKKSGKWRLLQDLRAVNATMHDMGALQPGLPSPVAVPKGWEIIIIDLQDCFFNIKLHPEDCKRFAFSVPSPNFKRPYQRFQWKVLPQGMKNSPTLCQKFVDKAILTVRDKYQDSYIVHYMDDILLAHPSRSIVDEILTSMIQALNKHGLVVSTEKIQKYDNLKYLGTHIQGDSVSYQKLQIRTDKLRTLNDFQKLLGNINWIRPFLKLTTGELKPLFEILNGDSNPISTRKLTPEACKALQLMNERLSTARVKRLDLSQPWSLCILKTEYTPTACLWQDGVVEWIHLPHISPKVITPYDIFCTQLIIKGRHRSKELFSKDPDYIVVPYTKVQFDLLLQEKEDWPISLLGFLGEVHFHLPKDPLLTFTLQTAIIFPHMTSTTPLEKGIVIFTDGSANGRSVTYIQGREPIIKENTQNTAQQAEIVAVITAFEEVSQPFNLYTDSKYVTGLFPEIETATLSPRTKIYTELKHLQRLIHKRQEKFYIGHIRGHTGLPGPLAQGNAYADSLTRILTAGKRTADGSEFEKRTADGSEFESPKKKAKVE

SEQ ID NO: 3189 - protein, 2116 aa, synthetic construct
  source 1..2116: note = Description of Artificial Sequence: Synthetic polypeptide
MPAAKRVKLDGGDKKYSIGLDIGTNSVGWAVITDEYKVPSKKFKVLGNTDRHSIKKNLIGALLFDSGETAEATRLKRTARRRYTRRKNRICYLQEIFSNEMAKVDDSFFHRLEESFLVEEDKKHERHPIFGNIVDEVAYHEKYPTIYHLRKKLVDSTDKADLRLIYLALAHMIKFRGHFLIEGDLNPDNSDVDKLFIQLVQTYNQLFEENPINASGVDAKAILSARLSKSRRLENLIAQLPGEKKNGLFGNLIALSLGLTPNFKSNFDLAEDAKLQLSKDTYDDDLDNLLAQIGDQYADLFLAAKNLSDAILLSDILRVNTEITKAPLSASMIKRYDEHHQDLTLLKALVRQQLPEKYKEIFFDQSKNGYAGYIDGGASQEEFYKFIKPILEKMDGTEELLVKLNREDLLRKQRTFDNGSIPHQIHLGELHAILRRQEDFYPFLKDNREKIEKILTFRIPYYVGPLARGNSRFAWMTRKSEETITPWNFEEVVDKGASAQSFIERMTNFDKNLPNEKVLPKHSLLYEYFTVYNELTKVKYVTEGMRKPAFLSGEQKKAIVDLLFKTNRKVTVKQLKEDYFKKIECFDSVEISGVEDRFNASLGTYHDLLKIIKDKDFLDNEENEDILEDIVLTLTLFEDREMIEERLKTYAHLFDDKVMKQLKRRRYTGWGRLSRKLINGIRDKQSGKTILDFLKSDGFANRNFMQLIHDDSLTFKEDIQKAQVSGQGDSLHEHIANLAGSPAIKKGILQTVKVVDELVKVMGRHKPENIVIEMARENQTTQKGQKNSRERMKRIEEGIKELGSQILKEHPVENTQLQNEKLYLYYLQNGRDMYVDQELDINRLSDYDVDHIVPQSFLKDDSIDNKVLTRSDKARGKSDNVPSEEVVKKMKNYWRQLLNAKLITQRKFDNLTKAERGGLSELDKAGFIKRQLVETRQITKHVAQILDSRMNTKYDENDKLIREVKVITLKSKLVSDFRKDFQFYKVREINNYHHAHDAYLNAVVGTALIKKYPKLESEFVYGDYKVYDVRKMIAKSEQEIGKATAKYFFYSNIMNFFKTEITLANGEIRKRPLIETNGETGEIVWDKGRDFATVRKVLSMPQVNIVKKTEVQTGGFSKESILPKRNSDKLIARKKDWDPKKYGGFDSPTVAYSVLVVAKVEKGKSKKLKSVKELLGITIMERSSFEKNPIDFLEAKGYKEVKKDLIIKLPKYSLFELENGRKRMLASAGELQKGNELALPSKYVNFLYLASHYEKLKGSPEDNEQKQLFVEQHKHYLDEIIEQISEFSKRVILADANLDKVLSAYNKHRDKPIREQAENIIHLFTLTNLGAPAAFKYFDTTIDRKRYTSTKEVLDATLIHQSITGLYETRIDLSQLGGDGGEAAAKGGSPAPGGWVQEISDSRPMLHIYLNGRRFLGLLNTGADKTCIAGRDWPANWPIHQTESSLQGLGMACGVARSSQPLRWQHEDKSGIIHPFVIPTLPFTLWGRDIMKDIKVRLMTDSPDDSQDLMIGAIESNLFADQISWKSDQPVWLNQWPLKQEKLQALQQLVTEQLQLGHLEESNSPWNTPVFVIKKKSGKWRLLQDLRAVNATMHDMGALQPGLPSPVAVPKGWEIIIIDLQDCFFNIKLHPEDCKRFAFSVPSPNFKRPYQRFQWKVLPQGMKNSPTLCQKFVDKAILTVRDKYQDSYIVHYMDDILLAHPSRSIVDEILTSMIQALNKHGLVVSTEKIQKYDNLKYLGTHIQGDSVSYQKLQIRTDKLRTLNDFQKLLGNINWIRPFLKLTTGELKPLFEILNGDSNPISTRKLTPEACKALQLMNERLSTARVKRLDLSQPWSLCILKTEYTPTACLWQDGVVEWIHLPHISPKVITPYDIFCTQLIIKGRHRSKELFSKDPDYIVVPYTKVQFDLLLQEKEDWPISLLGFLGEVHFHLPKDPLLTFTLQTAIIFPHMTSTTPLEKGIVIFTDGSANGRSVTYIQGREPIIKENTQNTAQQAEIVAVITAFEEVSQPFNLYTDSKYVTGLFPEIETATLSPRTKIYTELKHLQRLIHKRQEKFYIGHIRGHTGLPGPLAQGNAYADSLTRILTAGKRTADGSEFEKRTADGSEFESPKKKAKVE

SEQ ID NO: 3190 - protein, 2114 aa, synthetic construct
  source 1..2114: note = Description of Artificial Sequence: Synthetic polypeptide
MPAAKRVKLDGGDKKYSIGLDIGTNSVGWAVITDEYKVPSKKFKVLGNTDRHSIKKNLIGALLFDSGETAEATRLKRTARRRYTRRKNRICYLQEIFSNEMAKVDDSFFHRLEESFLVEEDKKHERHPIFGNIVDEVAYHEKYPTIYHLRKKLVDSTDKADLRLIYLALAHMIKFRGHFLIEGDLNPDNSDVDKLFIQLVQTYNQLFEENPINASGVDAKAILSARLSKSRRLENLIAQLPGEKKNGLFGNLIALSLGLTPNFKSNFDLAEDAKLQLSKDTYDDDLDNLLAQIGDQYADLFLAAKNLSDAILLSDILRVNTEITKAPLSASMIKRYDEHHQDLTLLKALVRQQLPEKYKEIFFDQSKNGYAGYIDGGASQEEFYKFIKPILEKMDGTEELLVKLNREDLLRKQRTFDNGSIPHQIHLGELHAILRRQEDFYPFLKDNREKIEKILTFRIPYYVGPLARGNSRFAWMTRKSEETITPWNFEEVVDKGASAQSFIERMTNFDKNLPNEKVLPKHSLLYEYFTVYNELTKVKYVTEGMRKPAFLSGEQKKAIVDLLFKTNRKVTVKQLKEDYFKKIECFDSVEISGVEDRFNASLGTYHDLLKIIKDKDFLDNEENEDILEDIVLTLTLFEDREMIEERLKTYAHLFDDKVMKQLKRRRYTGWGRLSRKLINGIRDKQSGKTILDFLKSDGFANRNFMQLIHDDSLTFKEDIQKAQVSGQGDSLHEHIANLAGSPAIKKGILQTVKVVDELVKVMGRHKPENIVIEMARENQTTQKGQKNSRERMKRIEEGIKELGSQILKEHPVENTQLQNEKLYLYYLQNGRDMYVDQELDINRLSDYDVDHIVPQSFLKDDSIDNKVLTRSDKARGKSDNVPSEEVVKKMKNYWRQLLNAKLITQRKFDNLTKAERGGLSELDKAGFIKRQLVETRQITKHVAQILDSRMNTKYDENDKLIREVKVITLKSKLVSDFRKDFQFYKVREINNYHHAHDAYLNAVVGTALIKKYPKLESEFVYGDYKVYDVRKMIAKSEQEIGKATAKYFFYSNIMNFFKTEITLANGEIRKRPLIETNGETGEIVWDKGRDFATVRKVLSMPQVNIVKKTEVQTGGFSKESILPKRNSDKLIARKKDWDPKKYGGFDSPTVAYSVLVVAKVEKGKSKKLKSVKELLGITIMERSSFEKNPIDFLEAKGYKEVKKDLIIKLPKYSLFELENGRKRMLASAGELQKGNELALPSKYVNFLYLASHYEKLKGSPEDNEQKQLFVEQHKHYLDEIIEQISEFSKRVILADANLDKVLSAYNKHRDKPIREQAENIIHLFTLTNLGAPAAFKYFDTTIDRKRYTSTKEVLDATLIHQSITGLYETRIDLSQLGGDGGGSSGGSGGGGGWVQEISDSRPMLHIYLNGRRFLGLLNTGADKTCIAGRDWPANWPIHQTESSLQGLGMACGVARSSQPLRWQHEDKSGIIHPFVIPTLPFTLWGRDIMKDIKVRLMTDSPDDSQDLMIGAIESNLFADQISWKSDQPVWLNQWPLKQEKLQALQQLVTEQLQLGHLEESNSPWNTPVFVIKKKSGKWRLLQDLRAVNATMHDMGALQPGLPSPVAVPKGWEIIIIDLQDCFFNIKLHPEDCKRFAFSVPSPNFKRPYQRFQWKVLPQGMKNSPTLCQKFVDKAILTVRDKYQDSYIVHYMDDILLAHPSRSIVDEILTSMIQALNKHGLVVSTEKIQKYDNLKYLGTHIQGDSVSYQKLQIRTDKLRTLNDFQKLLGNINWIRPFLKLTTGELKPLFEILNGDSNPISTRKLTPEACKALQLMNERLSTARVKRLDLSQPWSLCILKTEYTPTACLWQDGVVEWIHLPHISPKVITPYDIFCTQLIIKGRHRSKELFSKDPDYIVVPYTKVQFDLLLQEKEDWPISLLGFLGEVHFHLPKDPLLTFTLQTAIIFPHMTSTTPLEKGIVIFTDGSANGRSVTYIQGREPIIKENTQNTAQQAEIVAVITAFEEVSQPFNLYTDSKYVTGLFPEIETATLSPRTKIYTELKHLQRLIHKRQEKFYIGHIRGHTGLPGPLAQGNAYADSLTRILTAGKRTADGSEFEKRTADGSEFESPKKKAKVE

SEQ ID NO: 3191 - protein, 2116 aa, synthetic construct
  source 1..2116: note = Description of Artificial Sequence: Synthetic polypeptide
MPAAKRVKLDGGDKKYSIGLDIGTNSVGWAVITDEYKVPSKKFKVLGNTDRHSIKKNLIGALLFDSGETAEATRLKRTARRRYTRRKNRICYLQEIFSNEMAKVDDSFFHRLEESFLVEEDKKHERHPIFGNIVDEVAYHEKYPTIYHLRKKLVDSTDKADLRLIYLALAHMIKFRGHFLIEGDLNPDNSDVDKLFIQLVQTYNQLFEENPINASGVDAKAILSARLSKSRRLENLIAQLPGEKKNGLFGNLIALSLGLTPNFKSNFDLAEDAKLQLSKDTYDDDLDNLLAQIGDQYADLFLAAKNLSDAILLSDILRVNTEITKAPLSASMIKRYDEHHQDLTLLKALVRQQLPEKYKEIFFDQSKNGYAGYIDGGASQEEFYKFIKPILEKMDGTEELLVKLNREDLLRKQRTFDNGSIPHQIHLGELHAILRRQEDFYPFLKDNREKIEKILTFRIPYYVGPLARGNSRFAWMTRKSEETITPWNFEEVVDKGASAQSFIERMTNFDKNLPNEKVLPKHSLLYEYFTVYNELTKVKYVTEGMRKPAFLSGEQKKAIVDLLFKTNRKVTVKQLKEDYFKKIECFDSVEISGVEDRFNASLGTYHDLLKIIKDKDFLDNEENEDILEDIVLTLTLFEDREMIEERLKTYAHLFDDKVMKQLKRRRYTGWGRLSRKLINGIRDKQSGKTILDFLKSDGFANRNFMQLIHDDSLTFKEDIQKAQVSGQGDSLHEHIANLAGSPAIKKGILQTVKVVDELVKVMGRHKPENIVIEMARENQTTQKGQKNSRERMKRIEEGIKELGSQILKEHPVENTQLQNEKLYLYYLQNGRDMYVDQELDINRLSDYDVDHIVPQSFLKDDSIDNKVLTRSDKARGKSDNVPSEEVVKKMKNYWRQLLNAKLITQRKFDNLTKAERGGLSELDKAGFIKRQLVETRQITKHVAQILDSRMNTKYDENDKLIREVKVITLKSKLVSDFRKDFQFYKVREINNYHHAHDAYLNAVVGTALIKKYPKLESEFVYGDYKVYDVRKMIAKSEQEIGKATAKYFFYSNIMNFFKTEITLANGEIRKRPLIETNGETGEIVWDKGRDFATVRKVLSMPQVNIVKKTEVQTGGFSKESILPKRNSDKLIARKKDWDPKKYGGFDSPTVAYSVLVVAKVEKGKSKKLKSVKELLGITIMERSSFEKNPIDFLEAKGYKEVKKDLIIKLPKYSLFELENGRKRMLASAGELQKGNELALPSKYVNFLYLASHYEKLKGSPEDNEQKQLFVEQHKHYLDEIIEQISEFSKRVILADANLDKVLSAYNKHRDKPIREQAENIIHLFTLTNLGAPAAFKYFDTTIDRKRYTSTKEVLDATLIHQSITGLYETRIDLSQLGGDGGGGGEAAAKPAPGGWVQEISDSRPMLHIYLNGRRFLGLLNTGADKTCIAGRDWPANWPIHQTESSLQGLGMACGVARSSQPLRWQHEDKSGIIHPFVIPTLPFTLWGRDIMKDIKVRLMTDSPDDSQDLMIGAIESNLFADQISWKSDQPVWLNQWPLKQEKLQALQQLVTEQLQLGHLEESNSPWNTPVFVIKKKSGKWRLLQDLRAVNATMHDMGALQPGLPSPVAVPKGWEIIIIDLQDCFFNIKLHPEDCKRFAFSVPSPNFKRPYQRFQWKVLPQGMKNSPTLCQKFVDKAILTVRDKYQDSYIVHYMDDILLAHPSRSIVDEILTSMIQALNKHGLVVSTEKIQKYDNLKYLGTHIQGDSVSYQKLQIRTDKLRTLNDFQKLLGNINWIRPFLKLTTGELKPLFEILNGDSNPISTRKLTPEACKALQLMNERLSTARVKRLDLSQPWSLCILKTEYTPTACLWQDGVVEWIHLPHISPKVITPYDIFCTQLIIKGRHRSKELFSKDPDYIVVPYTKVQFDLLLQEKEDWPISLLGFLGEVHFHLPKDPLLTFTLQTAIIFPHMTSTTPLEKGIVIFTDGSANGRSVTYIQGREPIIKENTQNTAQQAEIVAVITAFEEVSQPFNLYTDSKYVTGLFPEIETATLSPRTKIYTELKHLQRLIHKRQEKFYIGHIRGHTGLPGPLAQGNAYADSLTRILTAGKRTADGSEFEKRTADGSEFESPKKKAKVE

SEQ ID NO: 3192 - protein, 2116 aa, synthetic construct
  source 1..2116: note = Description of Artificial Sequence: Synthetic polypeptide
MPAAKRVKLDGGDKKYSIGLDIGTNSVGWAVITDEYKVPSKKFKVLGNTDRHSIKKNLIGALLFDSGETAEATRLKRTARRRYTRRKNRICYLQEIFSNEMAKVDDSFFHRLEESFLVEEDKKHERHPIFGNIVDEVAYHEKYPTIYHLRKKLVDSTDKADLRLIYLALAHMIKFRGHFLIEGDLNPDNSDVDKLFIQLVQTYNQLFEENPINASGVDAKAILSARLSKSRRLENLIAQLPGEKKNGLFGNLIALSLGLTPNFKSNFDLAEDAKLQLSKDTYDDDLDNLLAQIGDQYADLFLAAKNLSDAILLSDILRVNTEITKAPLSASMIKRYDEHHQDLTLLKALVRQQLPEKYKEIFFDQSKNGYAGYIDGGASQEEFYKFIKPILEKMDGTEELLVKLNREDLLRKQRTFDNGSIPHQIHLGELHAILRRQEDFYPFLKDNREKIEKILTFRIPYYVGPLARGNSRFAWMTRKSEETITPWNFEEVVDKGASAQSFIERMTNFDKNLPNEKVLPKHSLLYEYFTVYNELTKVKYVTEGMRKPAFLSGEQKKAIVDLLFKTNRKVTVKQLKEDYFKKIECFDSVEISGVEDRFNASLGTYHDLLKIIKDKDFLDNEENEDILEDIVLTLTLFEDREMIEERLKTYAHLFDDKVMKQLKRRRYTGWGRLSRKLINGIRDKQSGKTILDFLKSDGFANRNFMQLIHDDSLTFKEDIQKAQVSGQGDSLHEHIANLAGSPAIKKGILQTVKVVDELVKVMGRHKPENIVIEMARENQTTQKGQKNSRERMKRIEEGIKELGSQILKEHPVENTQLQNEKLYLYYLQNGRDMYVDQELDINRLSDYDVDHIVPQSFLKDDSIDNKVLTRSDKARGKSDNVPSEEVVKKMKNYWRQLLNAKLITQRKFDNLTKAERGGLSELDKAGFIKRQLVETRQITKHVAQILDSRMNTKYDENDKLIREVKVITLKSKLVSDFRKDFQFYKVREINNYHHAHDAYLNAVVGTALIKKYPKLESEFVYGDYKVYDVRKMIAKSEQEIGKATAKYFFYSNIMNFFKTEITLANGEIRKRPLIETNGETGEIVWDKGRDFATVRKVLSMPQVNIVKKTEVQTGGFSKESILPKRNSDKLIARKKDWDPKKYGGFDSPTVAYSVLVVAKVEKGKSKKLKSVKELLGITIMERSSFEKNPIDFLEAKGYKEVKKDLIIKLPKYSLFELENGRKRMLASAGELQKGNELALPSKYVNFLYLASHYEKLKGSPEDNEQKQLFVEQHKHYLDEIIEQISEFSKRVILADANLDKVLSAYNKHRDKPIREQAENIIHLFTLTNLGAPAAFKYFDTTIDRKRYTSTKEVLDATLIHQSITGLYETRIDLSQLGGDGGGSSEAAAKGGSGGWVQEISDSRPMLHIYLNGRRFLGLLNTGADKTCIAGRDWPANWPIHQTESSLQGLGMACGVARSSQPLRWQHEDKSGIIHPFVIPTLPFTLWGRDIMKDIKVRLMTDSPDDSQDLMIGAIESNLFADQISWKSDQPVWLNQWPLKQEKLQALQQLVTEQLQLGHLEESNSPWNTPVFVIKKKSGKWRLLQDLRAVNATMHDMGALQPGLPSPVAVPKGWEIIIIDLQDCFFNIKLHPEDCKRFAFSVPSPNFKRPYQRFQWKVLPQGMKNSPTLCQKFVDKAILTVRDKYQDSYIVHYMDDILLAHPSRSIVDEILTSMIQALNKHGLVVSTEKIQKYDNLKYLGTHIQGDSVSYQKLQIRTDKLRTLNDFQKLLGNINWIRPFLKLTTGELKPLFEILNGDSNPISTRKLTPEACKALQLMNERLSTARVKRLDLSQPWSLCILKTEYTPTACLWQDGVVEWIHLPHISPKVITPYDIFCTQLIIKGRHRSKELFSKDPDYIVVPYTKVQFDLLLQEKEDWPISLLGFLGEVHFHLPKDPLLTFTLQTAIIFPHMTSTTPLEKGIVIFTDGSANGRSVTYIQGREPIIKENTQNTAQQAEIVAVITAFEEVSQPFNLYTDSKYVTGLFPEIETATLSPRTKIYTELKHLQRLIHKRQEKFYIGHIRGHTGLPGPLAQGNAYADSLTRILTAGKRTADGSEFEKRTADGSEFESPKKKAKVE

SEQ ID NO: 3193 - protein, 2125 aa, synthetic construct
  source 1..2125: note = Description of Artificial Sequence: Synthetic polypeptide
MPAAKRVKLDGGDKKYSIGLDIGTNSVGWAVITDEYKVPSKKFKVLGNTDRHSIKKNLIGALLFDSGETAEATRLKRTARRRYTRRKNRICYLQEIFSNEMAKVDDSFFHRLEESFLVEEDKKHERHPIFGNIVDEVAYHEKYPTIYHLRKKLVDSTDKADLRLIYLALAHMIKFRGHFLIEGDLNPDNSDVDKLFIQLVQTYNQLFEENPINASGVDAKAILSARLSKSRRLENLIAQLPGEKKNGLFGNLIALSLGLTPNFKSNFDLAEDAKLQLSKDTYDDDLDNLLAQIGDQYADLFLAAKNLSDAILLSDILRVNTEITKAPLSASMIKRYDEHHQDLTLLKALVRQQLPEKYKEIFFDQSKNGYAGYIDGGASQEEFYKFIKPILEKMDGTEELLVKLNREDLLRKQRTFDNGSIPHQIHLGELHAILRRQEDFYPFLKDNREKIEKILTFRIPYYVGPLARGNSRFAWMTRKSEETITPWNFEEVVDKGASAQSFIERMTNFDKNLPNEKVLPKHSLLYEYFTVYNELTKVKYVTEGMRKPAFLSGEQKKAIVDLLFKTNRKVTVKQLKEDYFKKIECFDSVEISGVEDRFNASLGTYHDLLKIIKDKDFLDNEENEDILEDIVLTLTLFEDREMIEERLKTYAHLFDDKVMKQLKRRRYTGWGRLSRKLINGIRDKQSGKTILDFLKSDGFANRNFMQLIHDDSLTFKEDIQKAQVSGQGDSLHEHIANLAGSPAIKKGILQTVKVVDELVKVMGRHKPENIVIEMARENQTTQKGQKNSRERMKRIEEGIKELGSQILKEHPVENTQLQNEKLYLYYLQNGRDMYVDQELDINRLSDYDVDHIVPQSFLKDDSIDNKVLTRSDKARGKSDNVPSEEVVKKMKNYWRQLLNAKLITQRKFDNLTKAERGGLSELDKAGFIKRQLVETRQITKHVAQILDSRMNTKYDENDKLIREVKVITLKSKLVSDFRKDFQFYKVREINNYHHAHDAYLNAVVGTALIKKYPKLESEFVYGDYKVYDVRKMIAKSEQEIGKATAKYFFYSNIMNFFKTEITLANGEIRKRPLIETNGETGEIVWDKGRDFATVRKVLSMPQVNIVKKTEVQTGGFSKESILPKRNSDKLIARKKDWDPKKYGGFDSPTVAYSVLVVAKVEKGKSKKLKSVKELLGITIMERSSFEKNPIDFLEAKGYKEVKKDLIIKLPKYSLFELENGRKRMLASAGELQKGNELALPSKYVNFLYLASHYEKLKGSPEDNEQKQLFVEQHKHYLDEIIEQISEFSKRVILADANLDKVLSAYNKHRDKPIREQAENIIHLFTLTNLGAPAAFKYFDTTIDRKRYTSTKEVLDATLIHQSITGLYETRIDLSQLGGDGGGGGGSGGGGSGGGGSGGGGSGGWVQEISDSRPMLHIYLNGRRFLGLLNTGADKTCIAGRDWPANWPIHQTESSLQGLGMACGVARSSQPLRWQHEDKSGIIHPFVIPTLPFTLWGRDIMKDIKVRLMTDSPDDSQDLMIGAIESNLFADQISWKSDQPVWLNQWPLKQEKLQALQQLVTEQLQLGHLEESNSPWNTPVFVIKKKSGKWRLLQDLRAVNATMHDMGALQPGLPSPVAVPKGWEIIIIDLQDCFFNIKLHPEDCKRFAFSVPSPNFKRPYQRFQWKVLPQGMKNSPTLCQKFVDKAILTVRDKYQDSYIVHYMDDILLAHPSRSIVDEILTSMIQALNKHGLVVSTEKIQKYDNLKYLGTHIQGDSVSYQKLQIRTDKLRTLNDFQKLLGNINWIRPFLKLTTGELKPLFEILNGDSNPISTRKLTPEACKALQLMNERLSTARVKRLDLSQPWSLCILKTEYTPTACLWQDGVVEWIHLPHISPKVITPYDIFCTQLIIKGRHRSKELFSKDPDYIVVPYTKVQFDLLLQEKEDWPISLLGFLGEVHFHLPKDPLLTFTLQTAIIFPHMTSTTPLEKGIVIFTDGSANGRSVTYIQGREPIIKENTQNTAQQAEIVAVITAFEEVSQPFNLYTDSKYVTGLFPEIETATLSPRTKIYTELKHLQRLIHKRQEKFYIGHIRGHTGLPGPLAQGNAYADSLTRILTAGKRTADGSEFEKRTADGSEFESPKKKAKVE

SEQ ID NO: 3194 - protein, 2115 aa, synthetic construct
  source 1..2115: note = Description of Artificial Sequence: Synthetic polypeptide
MPAAKRVKLDGGDKKYSIGLDIGTNSVGWAVITDEYKVPSKKFKVLGNTDRHSIKKNLIGALLFDSGETAEATRLKRTARRRYTRRKNRICYLQEIFSNEMAKVDDSFFHRLEESFLVEEDKKHERHPIFGNIVDEVAYHEKYPTIYHLRKKLVDSTDKADLRLIYLALAHMIKFRGHFLIEGDLNPDNSDVDKLFIQLVQTYNQLFEENPINASGVDAKAILSARLSKSRRLENLIAQLPGEKKNGLFGNLIALSLGLTPNFKSNFDLAEDAKLQLSKDTYDDDLDNLLAQIGDQYADLFLAAKNLSDAILLSDILRVNTEITKAPLSASMIKRYDEHHQDLTLLKALVRQQLPEKYKEIFFDQSKNGYAGYIDGGASQEEFYKFIKPILEKMDGTEELLVKLNREDLLRKQRTFDNGSIPHQIHLGELHAILRRQEDFYPFLKDNREKIEKILTFRIPYYVGPLARGNSRFAWMTRKSEETITPWNFEEVVDKGASAQSFIERMTNFDKNLPNEKVLPKHSLLYEYFTVYNELTKVKYVTEGMRKPAFLSGEQKKAIVDLLFKTNRKVTVKQLKEDYFKKIECFDSVEISGVEDRFNASLGTYHDLLKIIKDKDFLDNEENEDILEDIVLTLTLFEDREMIEERLKTYAHLFDDKVMKQLKRRRYTGWGRLSRKLINGIRDKQSGKTILDFLKSDGFANRNFMQLIHDDSLTFKEDIQKAQVSGQGDSLHEHIANLAGSPAIKKGILQTVKVVDELVKVMGRHKPENIVIEMARENQTTQKGQKNSRERMKRIEEGIKELGSQILKEHPVENTQLQNEKLYLYYLQNGRDMYVDQELDINRLSDYDVDHIVPQSFLKDDSIDNKVLTRSDKARGKSDNVPSEEVVKKMKNYWRQLLNAKLITQRKFDNLTKAERGGLSELDKAGFIKRQLVETRQITKHVAQILDSRMNTKYDENDKLIREVKVITLKSKLVSDFRKDFQFYKVREINNYHHAHDAYLNAVVGTALIKKYPKLESEFVYGDYKVYDVRKMIAKSEQEIGKATAKYFFYSNIMNFFKTEITLANGEIRKRPLIETNGETGEIVWDKGRDFATVRKVLSMPQVNIVKKTEVQTGGFSKESILPKRNSDKLIARKKDWDPKKYGGFDSPTVAYSVLVVAKVEKGKSKKLKSVKELLGITIMERSSFEKNPIDFLEAKGYKEVKKDLIIKLPKYSLFELENGRKRMLASAGELQKGNELALPSKYVNFLYLASHYEKLKGSPEDNEQKQLFVEQHKHYLDEIIEQISEFSKRVILADANLDKVLSAYNKHRDKPIREQAENIIHLFTLTNLGAPAAFKYFDTTIDRKRYTSTKEVLDATLIHQSITGLYETRIDLSQLGGDGGGGGGSGGGGSGGWVQEISDSRPMLHIYLNGRRFLGLLNTGADKTCIAGRDWPANWPIHQTESSLQGLGMACGVARSSQPLRWQHEDKSGIIHPFVIPTLPFTLWGRDIMKDIKVRLMTDSPDDSQDLMIGAIESNLFADQISWKSDQPVWLNQWPLKQEKLQALQQLVTEQLQLGHLEESNSPWNTPVFVIKKKSGKWRLLQDLRAVNATMHDMGALQPGLPSPVAVPKGWEIIIIDLQDCFFNIKLHPEDCKRFAFSVPSPNFKRPYQRFQWKVLPQGMKNSPTLCQKFVDKAILTVRDKYQDSYIVHYMDDILLAHPSRSIVDEILTSMIQALNKHGLVVSTEKIQKYDNLKYLGTHIQGDSVSYQKLQIRTDKLRTLNDFQKLLGNINWIRPFLKLTTGELKPLFEILNGDSNPISTRKLTPEACKALQLMNERLSTARVKRLDLSQPWSLCILKTEYTPTACLWQDGVVEWIHLPHISPKVITPYDIFCTQLIIKGRHRSKELFSKDPDYIVVPYTKVQFDLLLQEKEDWPISLLGFLGEVHFHLPKDPLLTFTLQTAIIFPHMTSTTPLEKGIVIFTDGSANGRSVTYIQGREPIIKENTQNTAQQAEIVAVITAFEEVSQPFNLYTDSKYVTGLFPEIETATLSPRTKIYTELKHLQRLIHKRQEKFYIGHIRGHTGLPGPLAQGNAYADSLTRILTAGKRTADGSEFEKRTADGSEFESPKKKAKVE

SEQ ID NO: 3195 - protein, 2114 aa, synthetic construct
  source 1..2114: note = Description of Artificial Sequence: Synthetic polypeptide
MPAAKRVKLDGGDKKYSIGLDIGTNSVGWAVITDEYKVPSKKFKVLGNTDRHSIKKNLIGALLFDSGETAEATRLKRTARRRYTRRKNRICYLQEIFSNEMAKVDDSFFHRLEESFLVEEDKKHERHPIFGNIVDEVAYHEKYPTIYHLRKKLVDSTDKADLRLIYLALAHMIKFRGHFLIEGDLNPDNSDVDKLFIQLVQTYNQLFEENPINASGVDAKAILSARLSKSRRLENLIAQLPGEKKNGLFGNLIALSLGLTPNFKSNFDLAEDAKLQLSKDTYDDDLDNLLAQIGDQYADLFLAAKNLSDAILLSDILRVNTEITKAPLSASMIKRYDEHHQDLTLLKALVRQQLPEKYKEIFFDQSKNGYAGYIDGGASQEEFYKFIKPILEKMDGTEELLVKLNREDLLRKQRTFDNGSIPHQIHLGELHAILRRQEDFYPFLKDNREKIEKILTFRIPYYVGPLARGNSRFAWMTRKSEETITPWNFEEVVDKGASAQSFIERMTNFDKNLPNEKVLPKHSLLYEYFTVYNELTKVKYVTEGMRKPAFLSGEQKKAIVDLLFKTNRKVTVKQLKEDYFKKIECFDSVEISGVEDRFNASLGTYHDLLKIIKDKDFLDNEENEDILEDIVLTLTLFEDREMIEERLKTYAHLFDDKVMKQLKRRRYTGWGRLSRKLINGIRDKQSGKTILDFLKSDGFANRNFMQLIHDDSLTFKEDIQKAQVSGQGDSLHEHIANLAGSPAIKKGILQTVKVVDELVKVMGRHKPENIVIEMARENQTTQKGQKNSRERMKRIEEGIKELGSQILKEHPVENTQLQNEKLYLYYLQNGRDMYVDQELDINRLSDYDVDHIVPQSFLKDDSIDNKVLTRSDKARGKSDNVPSEEVVKKMKNYWRQLLNAKLITQRKFDNLTKAERGGLSELDKAGFIKRQLVETRQITKHVAQILDSRMNTKYDENDKLIREVKVITLKSKLVSDFRKDFQFYKVREINNYHHAHDAYLNAVVGTALIKKYPKLESEFVYGDYKVYDVRKMIAKSEQEIGKATAKYFFYSNIMNFFKTEITLANGEIRKRPLIETNGETGEIVWDKGRDFATVRKVLSMPQVNIVKKTEVQTGGFSKESILPKRNSDKLIARKKDWDPKKYGGFDSPTVAYSVLVVAKVEKGKSKKLKSVKELLGITIMERSSFEKNPIDFLEAKGYKEVKKDLIIKLPKYSLFELENGRKRMLASAGELQKGNELALPSKYVNFLYLASHYEKLKGSPEDNEQKQLFVEQHKHYLDEIIEQISEFSKRVILADANLDKVLSAYNKHRDKPIREQAENIIHLFTLTNLGAPAAFKYFDTTIDRKRYTSTKEVLDATLIHQSITGLYETRIDLSQLGGDGGPAPGGGGSSGGWVQEISDSRPMLHIYLNGRRFLGLLNTGADKTCIAGRDWPANWPIHQTESSLQGLGMACGVARSSQPLRWQHEDKSGIIHPFVIPTLPFTLWGRDIMKDIKVRLMTDSPDDSQDLMIGAIESNLFADQISWKSDQPVWLNQWPLKQEKLQALQQLVTEQLQLGHLEESNSPWNTPVFVIKKKSGKWRLLQDLRAVNATMHDMGALQPGLPSPVAVPKGWEIIIIDLQDCFFNIKLHPEDCKRFAFSVPSPNFKRPYQRFQWKVLPQGMKNSPTLCQKFVDKAILTVRDKYQDSYIVHYMDDILLAHPSRSIVDEILTSMIQALNKHGLVVSTEKIQKYDNLKYLGTHIQGDSVSYQKLQIRTDKLRTLNDFQKLLGNINWIRPFLKLTTGELKPLFEILNGDSNPISTRKLTPEACKALQLMNERLSTARVKRLDLSQPWSLCILKTEYTPTACLWQDGVVEWIHLPHISPKVITPYDIFCTQLIIKGRHRSKELFSKDPDYIVVPYTKVQFDLLLQEKEDWPISLLGFLGEVHFHLPKDPLLTFTLQTAIIFPHMTSTTPLEKGIVIFTDGSANGRSVTYIQGREPIIKENTQNTAQQAEIVAVITAFEEVSQPFNLYTDSKYVTGLFPEIETATLSPRTKIYTELKHLQRLIHKRQEKFYIGHIRGHTGLPGPLAQGNAYADSLTRILTAGKRTADGSEFEKRTADGSEFESPKKKAKVE

SEQ ID NO: 3196 - protein, 2024 aa, synthetic construct
  source 1..2024: note = Description of Artificial Sequence: Synthetic polypeptide
MPAAKRVKLDGGDKKYSIGLDIGTNSVGWAVITDEYKVPSKKFKVLGNTDRHSIKKNLIGALLFDSGETAEATRLKRTARRRYTRRKNRICYLQEIFSNEMAKVDDSFFHRLEESFLVEEDKKHERHPIFGNIVDEVAYHEKYPTIYHLRKKLVDSTDKADLRLIYLALAHMIKFRGHFLIEGDLNPDNSDVDKLFIQLVQTYNQLFEENPINASGVDAKAILSARLSKSRRLENLIAQLPGEKKNGLFGNLIALSLGLTPNFKSNFDLAEDAKLQLSKDTYDDDLDNLLAQIGDQYADLFLAAKNLSDAILLSDILRVNTEITKAPLSASMIKRYDEHHQDLTLLKALVRQQLPEKYKEIFFDQSKNGYAGYIDGGASQEEFYKFIKPILEKMDGTEELLVKLNREDLLRKQRTFDNGSIPHQIHLGELHAILRRQEDFYPFLKDNREKIEKILTFRIPYYVGPLARGNSRFAWMTRKSEETITPWNFEEVVDKGASAQSFIERMTNFDKNLPNEKVLPKHSLLYEYFTVYNELTKVKYVTEGMRKPAFLSGEQKKAIVDLLFKTNRKVTVKQLKEDYFKKIECFDSVEISGVEDRFNASLGTYHDLLKIIKDKDFLDNEENEDILEDIVLTLTLFEDREMIEERLKTYAHLFDDKVMKQLKRRRYTGWGRLSRKLINGIRDKQSGKTILDFLKSDGFANRNFMQLIHDDSLTFKEDIQKAQVSGQGDSLHEHIANLAGSPAIKKGILQTVKVVDELVKVMGRHKPENIVIEMARENQTTQKGQKNSRERMKRIEEGIKELGSQILKEHPVENTQLQNEKLYLYYLQNGRDMYVDQELDINRLSDYDVDHIVPQSFLKDDSIDNKVLTRSDKARGKSDNVPSEEVVKKMKNYWRQLLNAKLITQRKFDNLTKAERGGLSELDKAGFIKRQLVETRQITKHVAQILDSRMNTKYDENDKLIREVKVITLKSKLVSDFRKDFQFYKVREINNYHHAHDAYLNAVVGTALIKKYPKLESEFVYGDYKVYDVRKMIAKSEQEIGKATAKYFFYSNIMNFFKTEITLANGEIRKRPLIETNGETGEIVWDKGRDFATVRKVLSMPQVNIVKKTEVQTGGFSKESILPKRNSDKLIARKKDWDPKKYGGFDSPTVAYSVLVVAKVEKGKSKKLKSVKELLGITIMERSSFEKNPIDFLEAKGYKEVKKDLIIKLPKYSLFELENGRKRMLASAGELQKGNELALPSKYVNFLYLASHYEKLKGSPEDNEQKQLFVEQHKHYLDEIIEQISEFSKRVILADANLDKVLSAYNKHRDKPIREQAENIIHLFTLTNLGAPAAFKYFDTTIDRKRYTSTKEVLDATLIHQSITGLYETRIDLSQLGGDGGGGGPAPEAAAKGGGRDIMKDIKVRLMTDSPDDSQDLMIGAIESNLFADQISWKSDQPVWLNQWPLKQEKLQALQQLVTEQLQLGHLEESNSPWNTPVFVIKKKSGKWRLLQDLRAVNATMHDMGALQPGLPSPVAVPKGWEIIIIDLQDCFFNIKLHPEDCKRFAFSVPSPNFKRPYQRFQWKVLPQGMKNSPTLCQKFVDKAILTVRDKYQDSYIVHYMDDILLAHPSRSIVDEILTSMIQALNKHGLVVSTEKIQKYDNLKYLGTHIQGDSVSYQKLQIRTDKLRTLNDFQKLLGNINWIRPFLKLTTGELKPLFEILNGDSNPISTRKLTPEACKALQLMNERLSTARVKRLDLSQPWSLCILKTEYTPTACLWQDGVVEWIHLPHISPKVITPYDIFCTQLIIKGRHRSKELFSKDPDYIVVPYTKVQFDLLLQEKEDWPISLLGFLGEVHFHLPKDPLLTFTLQTAIIFPHMTSTTPLEKGIVIFTDGSANGRSVTYIQGREPIIKENTQNTAQQAEIVAVITAFEEVSQPFNLYTDSKYVTGLFPEIETATLSPRTKIYTELKHLQRLIHKRQEKFYIGHIRGHTGLPGPLAQGNAYADSLTRILTAGKRTADGSEFEKRTADGSEFESPKKKAKVE

SEQ ID NO: 3197 - protein, 2059 aa, synthetic construct
  source 1..2059: note = Description of Artificial Sequence: Synthetic polypeptide
MPAAKRVKLDGGDKKYSIGLDIGTNSVGWAVITDEYKVPSKKFKVLGNTDRHSIKKNLIGALLFDSGETAEATRLKRTARRRYTRRKNRICYLQEIFSNEMAKVDDSFFHRLEESFLVEEDKKHERHPIFGNIVDEVAYHEKYPTIYHLRKKLVDSTDKADLRLIYLALAHMIKFRGHFLIEGDLNPDNSDVDKLFIQLVQTYNQLFEENPINASGVDAKAILSARLSKSRRLENLIAQLPGEKKNGLFGNLIALSLGLTPNFKSNFDLAEDAKLQLSKDTYDDDLDNLLAQIGDQYADLFLAAKNLSDAILLSDILRVNTEITKAPLSASMIKRYDEHHQDLTLLKALVRQQLPEKYKEIFFDQSKNGYAGYIDGGASQEEFYKFIKPILEKMDGTEELLVKLNREDLLRKQRTFDNGSIPHQIHLGELHAILRRQEDFYPFLKDNREKIEKILTFRIPYYVGPLARGNSRFAWMTRKSEETITPWNFEEVVDKGASAQSFIERMTNFDKNLPNEKVLPKHSLLYEYFTVYNELTKVKYVTEGMRKPAFLSGEQKKAIVDLLFKTNRKVTVKQLKEDYFKKIECFDSVEISGVEDRFNASLGTYHDLLKIIKDKDFLDNEENEDILEDIVLTLTLFEDREMIEERLKTYAHLFDDKVMKQLKRRRYTGWGRLSRKLINGIRDKQSGKTILDFLKSDGFANRNFMQLIHDDSLTFKEDIQKAQVSGQGDSLHEHIANLAGSPAIKKGILQTVKVVDELVKVMGRHKPENIVIEMARENQTTQKGQKNSRERMKRIEEGIKELGSQILKEHPVENTQLQNEKLYLYYLQNGRDMYVDQELDINRLSDYDVDHIVPQSFLKDDSIDNKVLTRSDKARGKSDNVPSEEVVKKMKNYWRQLLNAKLITQRKFDNLTKAERGGLSELDKAGFIKRQLVETRQITKHVAQILDSRMNTKYDENDKLIREVKVITLKSKLVSDFRKDFQFYKVREINNYHHAHDAYLNAVVGTALIKKYPKLESEFVYGDYKVYDVRKMIAKSEQEIGKATAKYFFYSNIMNFFKTEITLANGEIRKRPLIETNGETGEIVWDKGRDFATVRKVLSMPQVNIVKKTEVQTGGFSKESILPKRNSDKLIARKKDWDPKKYGGFDSPTVAYSVLVVAKVEKGKSKKLKSVKELLGITIMERSSFEKNPIDFLEAKGYKEVKKDLIIKLPKYSLFELENGRKRMLASAGELQKGNELALPSKYVNFLYLASHYEKLKGSPEDNEQKQLFVEQHKHYLDEIIEQISEFSKRVILADANLDKVLSAYNKHRDKPIREQAENIIHLFTLTNLGAPAAFKYFDTTIDRKRYTSTKEVLDATLIHQSITGLYETRIDLSQLGGDGGAEAAAKEAAAKEAAAKEAAAKALEAEAAAKEAAAKEAAAKEAAAKAGGGRDIMKDIKVRLMTDSPDDSQDLMIGAIESNLFADQISWKSDQPVWLNQWPLKQEKLQALQQLVTEQLQLGHLEESNSPWNTPVFVIKKKSGKWRLLQDLRAVNATMHDMGALQPGLPSPVAVPKGWEIIIIDLQDCFFNIKLHPEDCKRFAFSVPSPNFKRPYQRFQWKVLPQGMKNSPTLCQKFVDKAILTVRDKYQDSYIVHYMDDILLAHPSRSIVDEILTSMIQALNKHGLVVSTEKIQKYDNLKYLGTHIQGDSVSYQKLQIRTDKLRTLNDFQKLLGNINWIRPFLKLTTGELKPLFEILNGDSNPISTRKLTPEACKALQLMNERLSTARVKRLDLSQPWSLCILKTEYTPTACLWQDGVVEWIHLPHISPKVITPYDIFCTQLIIKGRHRSKELFSKDPDYIVVPYTKVQFDLLLQEKEDWPISLLGFLGEVHFHLPKDPLLTFTLQTAIIFPHMTSTTPLEKGIVIFTDGSANGRSVTYIQGREPIIKENTQNTAQQAEIVAVITAFEEVSQPFNLYTDSKYVTGLFPEIETATLSPRTKIYTELKHLQRLIHKRQEKFYIGHIRGHTGLPGPLAQGNAYADSLTRILTAGKRTADGSEFEKRTADGSEFESPKKKAKVE

SEQ ID NO: 3198 - protein, 2024 aa, synthetic construct
  source 1..2024: note = Description of Artificial Sequence: Synthetic polypeptide
MPAAKRVKLDGGDKKYSIGLDIGTNSVGWAVITDEYKVPSKKFKVLGNTDRHSIKKNLIGALLFDSGETAEATRLKRTARRRYTRRKNRICYLQEIFSNEMAKVDDSFFHRLEESFLVEEDKKHERHPIFGNIVDEVAYHEKYPTIYHLRKKLVDSTDKADLRLIYLALAHMIKFRGHFLIEGDLNPDNSDVDKLFIQLVQTYNQLFEENPINASGVDAKAILSARLSKSRRLENLIAQLPGEKKNGLFGNLIALSLGLTPNFKSNFDLAEDAKLQLSKDTYDDDLDNLLAQIGDQYADLFLAAKNLSDAILLSDILRVNTEITKAPLSASMIKRYDEHHQDLTLLKALVRQQLPEKYKEIFFDQSKNGYAGYIDGGASQEEFYKFIKPILEKMDGTEELLVKLNREDLLRKQRTFDNGSIPHQIHLGELHAILRRQEDFYPFLKDNREKIEKILTFRIPYYVGPLARGNSRFAWMTRKSEETITPWNFEEVVDKGASAQSFIERMTNFDKNLPNEKVLPKHSLLYEYFTVYNELTKVKYVTEGMRKPAFLSGEQKKAIVDLLFKTNRKVTVKQLKEDYFKKIECFDSVEISGVEDRFNASLGTYHDLLKIIKDKDFLDNEENEDILEDIVLTLTLFEDREMIEERLKTYAHLFDDKVMKQLKRRRYTGWGRLSRKLINGIRDKQSGKTILDFLKSDGFANRNFMQLIHDDSLTFKEDIQKAQVSGQGDSLHEHIANLAGSPAIKKGILQTVKVVDELVKVMGRHKPENIVIEMARENQTTQKGQKNSRERMKRIEEGIKELGSQILKEHPVENTQLQNEKLYLYYLQNGRDMYVDQELDINRLSDYDVDHIVPQSFLKDDSIDNKVLTRSDKARGKSDNVPSEEVVKKMKNYWRQLLNAKLITQRKFDNLTKAERGGLSELDKAGFIKRQLVETRQITKHVAQILDSRMNTKYDENDKLIREVKVITLKSKLVSDFRKDFQFYKVREINNYHHAHDAYLNAVVGTALIKKYPKLESEFVYGDYKVYDVRKMIAKSEQEIGKATAKYFFYSNIMNFFKTEITLANGEIRKRPLIETNGETGEIVWDKGRDFATVRKVLSMPQVNIVKKTEVQTGGFSKESILPKRNSDKLIARKKDWDPKKYGGFDSPTVAYSVLVVAKVEKGKSKKLKSVKELLGITIMERSSFEKNPIDFLEAKGYKEVKKDLIIKLPKYSLFELENGRKRMLASAGELQKGNELALPSKYVNFLYLASHYEKLKGSPEDNEQKQLFVEQHKHYLDEIIEQISEFSKRVILADANLDKVLSAYNKHRDKPIREQAENIIHLFTLTNLGAPAAFKYFDTTIDRKRYTSTKEVLDATLIHQSITGLYETRIDLSQLGGDGGPAPGSSEAAAKGGGRDIMKDIKVRLMTDSPDDSQDLMIGAIESNLFADQISWKSDQPVWLNQWPLKQEKLQALQQLVTEQLQLGHLEESNSPWNTPVFVIKKKSGKWRLLQDLRAVNATMHDMGALQPGLPSPVAVPKGWEIIIIDLQDCFFNIKLHPEDCKRFAFSVPSPNFKRPYQRFQWKVLPQGMKNSPTLCQKFVDKAILTVRDKYQDSYIVHYMDDILLAHPSRSIVDEILTSMIQALNKHGLVVSTEKIQKYDNLKYLGTHIQGDSVSYQKLQIRTDKLRTLNDFQKLLGNINWIRPFLKLTTGELKPLFEILNGDSNPISTRKLTPEACKALQLMNERLSTARVKRLDLSQPWSLCILKTEYTPTACLWQDGVVEWIHLPHISPKVITPYDIFCTQLIIKGRHRSKELFSKDPDYIVVPYTKVQFDLLLQEKEDWPISLLGFLGEVHFHLPKDPLLTFTLQTAIIFPHMTSTTPLEKGIVIFTDGSANGRSVTYIQGREPIIKENTQNTAQQAEIVAVITAFEEVSQPFNLYTDSKYVTGLFPEIETATLSPRTKIYTELKHLQRLIHKRQEKFYIGHIRGHTGLPGPLAQGNAYADSLTRILTAGKRTADGSEFEKRTADGSEFESPKKKAKVE

SEQ ID NO: 3199 - protein, 2022 aa, synthetic construct
  source 1..2022: note = Description of Artificial Sequence: Synthetic polypeptide
MPAAKRVKLDGGDKKYSIGLDIGTNSVGWAVITDEYKVPSKKFKVLGNTDRHSIKKNLIGALLFDSGETAEATRLKRTARRRYTRRKNRICYLQEIFSNEMAKVDDSFFHRLEESFLVEEDKKHERHPIFGNIVDEVAYHEKYPTIYHLRKKLVDSTDKADLRLIYLALAHMIKFRGHFLIEGDLNPDNSDVDKLFIQLVQTYNQLFEENPINASGVDAKAILSARLSKSRRLENLIAQLPGEKKNGLFGNLIALSLGLTPNFKSNFDLAEDAKLQLSKDTYDDDLDNLLAQIGDQYADLFLAAKNLSDAILLSDILRVNTEITKAPLSASMIKRYDEHHQDLTLLKALVRQQLPEKYKEIFFDQSKNGYAGYIDGGASQEEFYKFIKPILEKMDGTEELLVKLNREDLLRKQRTFDNGSIPHQIHLGELHAILRRQEDFYPFLKDNREKIEKILTFRIPYYVGPLARGNSRFAWMTRKSEETITPWNFEEVVDKGASAQSFIERMTNFDKNLPNEKVLPKHSLLYEYFTVYNELTKVKYVTEGMRKPAFLSGEQKKAIVDLLFKTNRKVTVKQLKEDYFKKIECFDSVEISGVEDRFNASLGTYHDLLKIIKDKDFLDNEENEDILEDIVLTLTLFEDREMIEERLKTYAHLFDDKVMKQLKRRRYTGWGRLSRKLINGIRDKQSGKTILDFLKSDGFANRNFMQLIHDDSLTFKEDIQKAQVSGQGDSLHEHIANLAGSPAIKKGILQTVKVVDELVKVMGRHKPENIVIEMARENQTTQKGQKNSRERMKRIEEGIKELGSQILKEHPVENTQLQNEKLYLYYLQNGRDMYVDQELDINRLSDYDVDHIVPQSFLKDDSIDNKVLTRSDKARGKSDNVPSEEVVKKMKNYWRQLLNAKLITQRKFDNLTKAERGGLSELDKAGFIKRQLVETRQITKHVAQILDSRMNTKYDENDKLIREVKVITLKSKLVSDFRKDFQFYKVREINNYHHAHDAYLNAVVGTALIKKYPKLESEFVYGDYKVYDVRKMIAKSEQEIGKATAKYFFYSNIMNFFKTEITLANGEIRKRPLIETNGETGEIVWDKGRDFATVRKVLSMPQVNIVKKTEVQTGGFSKESILPKRNSDKLIARKKDWDPKKYGGFDSPTVAYSVLVVAKVEKGKSKKLKSVKELLGITIMERSSFEKNPIDFLEAKGYKEVKKDLIIKLPKYSLFELENGRKRMLASAGELQKGNELALPSKYVNFLYLASHYEKLKGSPEDNEQKQLFVEQHKHYLDEIIEQISEFSKRVILADANLDKVLSAYNKHRDKPIREQAENIIHLFTLTNLGAPAAFKYFDTTIDRKRYTSTKEVLDATLIHQSITGLYETRIDLSQLGGDGGGGSGGGGSSGGGRDIMKDIKVRLMTDSPDDSQDLMIGAIESNLFADQISWKSDQPVWLNQWPLKQEKLQALQQLVTEQLQLGHLEESNSPWNTPVFVIKKKSGKWRLLQDLRAVNATMHDMGALQPGLPSPVAVPKGWEIIIIDLQDCFFNIKLHPEDCKRFAFSVPSPNFKRPYQRFQWKVLPQGMKNSPTLCQKFVDKAILTVRDKYQDSYIVHYMDDILLAHPSRSIVDEILTSMIQALNKHGLVVSTEKIQKYDNLKYLGTHIQGDSVSYQKLQIRTDKLRTLNDFQKLLGNINWIRPFLKLTTGELKPLFEILNGDSNPISTRKLTPEACKALQLMNERLSTARVKRLDLSQPWSLCILKTEYTPTACLWQDGVVEWIHLPHISPKVITPYDIFCTQLIIKGRHRSKELFSKDPDYIVVPYTKVQFDLLLQEKEDWPISLLGFLGEVHFHLPKDPLLTFTLQTAIIFPHMTSTTPLEKGIVIFTDGSANGRSVTYIQGREPIIKENTQNTAQQAEIVAVITAFEEVSQPFNLYTDSKYVTGLFPEIETATLSPRTKIYTELKHLQRLIHKRQEKFYIGHIRGHTGLPGPLAQGNAYADSLTRILTAGKRTADGSEFEKRTADGSEFESPKKKAKVE

SEQ ID NO: 3200 - protein, 2024 aa, synthetic construct
  source 1..2024: note = Description of Artificial Sequence: Synthetic polypeptide
MPAAKRVKLDGGDKKYSIGLDIGTNSVGWAVITDEYKVPSKKFKVLGNTDRHSIKKNLIGALLFDSGETAEATRLKRTARRRYTRRKNRICYLQEIFSNEMAKVDDSFFHRLEESFLVEEDKKHERHPIFGNIVDEVAYHEKYPTIYHLRKKLVDSTDKADLRLIYLALAHMIKFRGHFLIEGDLNPDNSDVDKLFIQLVQTYNQLFEENPINASGVDAKAILSARLSKSRRLENLIAQLPGEKKNGLFGNLIALSLGLTPNFKSNFDLAEDAKLQLSKDTYDDDLDNLLAQIGDQYADLFLAAKNLSDAILLSDILRVNTEITKAPLSASMIKRYDEHHQDLTLLKALVRQQLPEKYKEIFFDQSKNGYAGYIDGGASQEEFYKFIKPILEKMDGTEELLVKLNREDLLRKQRTFDNGSIPHQIHLGELHAILRRQEDFYPFLKDNREKIEKILTFRIPYYVGPLARGNSRFAWMTRKSEETITPWNFEEVVDKGASAQSFIERMTNFDKNLPNEKVLPKHSLLYEYFTVYNELTKVKYVTEGMRKPAFLSGEQKKAIVDLLFKTNRKVTVKQLKEDYFKKIECFDSVEISGVEDRFNASLGTYHDLLKIIKDKDFLDNEENEDILEDIVLTLTLFEDREMIEERLKTYAHLFDDKVMKQLKRRRYTGWGRLSRKLINGIRDKQSGKTILDFLKSDGFANRNFMQLIHDDSLTFKEDIQKAQVSGQGDSLHEHIANLAGSPAIKKGILQTVKVVDELVKVMGRHKPENIVIEMARENQTTQKGQKNSRERMKRIEEGIKELGSQILKEHPVENTQLQNEKLYLYYLQNGRDMYVDQELDINRLSDYDVDHIVPQSFLKDDSIDNKVLTRSDKARGKSDNVPSEEVVKKMKNYWRQLLNAKLITQRKFDNLTKAERGGLSELDKAGFIKRQLVETRQITKHVAQILDSRMNTKYDENDKLIREVKVITLKSKLVSDFRKDFQFYKVREINNYHHAHDAYLNAVVGTALIKKYPKLESEFVYGDYKVYDVRKMIAKSEQEIGKATAKYFFYSNIMNFFKTEITLANGEIRKRPLIETNGETGEIVWDKGRDFATVRKVLSMPQVNIVKKTEVQTGGFSKESILPKRNSDKLIARKKDWDPKKYGGFDSPTVAYSVLVVAKVEKGKSKKLKSVKELLGITIMERSSFEKNPIDFLEAKGYKEVKKDLIIKLPKYSLFELENGRKRMLASAGELQKGNELALPSKYVNFLYLASHYEKLKGSPEDNEQKQLFVEQHKHYLDEIIEQISEFSKRVILADANLDKVLSAYNKHRDKPIREQAENIIHLFTLTNLGAPAAFKYFDTTIDRKRYTSTKEVLDATLIHQSITGLYETRIDLSQLGGDGGPAPEAAAKGGGGGGRDIMKDIKVRLMTDSPDDSQDLMIGAIESNLFADQISWKSDQPVWLNQWPLKQEKLQALQQLVTEQLQLGHLEESNSPWNTPVFVIKKKSGKWRLLQDLRAVNATMHDMGALQPGLPSPVAVPKGWEIIIIDLQDCFFNIKLHPEDCKRFAFSVPSPNFKRPYQRFQWKVLPQGMKNSPTLCQKFVDKAILTVRDKYQDSYIVHYMDDILLAHPSRSIVDEILTSMIQALNKHGLVVSTEKIQKYDNLKYLGTHIQGDSVSYQKLQIRTDKLRTLNDFQKLLGNINWIRPFLKLTTGELKPLFEILNGDSNPISTRKLTPEACKALQLMNERLSTARVKRLDLSQPWSLCILKTEYTPTACLWQDGVVEWIHLPHISPKVITPYDIFCTQLIIKGRHRSKELFSKDPDYIVVPYTKVQFDLLLQEKEDWPISLLGFLGEVHFHLPKDPLLTFTLQTAIIFPHMTSTTPLEKGIVIFTDGSANGRSVTYIQGREPIIKENTQNTAQQAEIVAVITAFEEVSQPFNLYTDSKYVTGLFPEIETATLSPRTKIYTELKHLQRLIHKRQEKFYIGHIRGHTGLPGPLAQGNAYADSLTRILTAGKRTADGSEFEKRTADGSEFESPKKKAKVE

SEQ ID NO: 3201 - protein, 2028 aa, synthetic construct
  source 1..2028: note = Description of Artificial Sequence: Synthetic polypeptide
MPAAKRVKLDGGDKKYSIGLDIGTNSVGWAVITDEYKVPSKKFKVLGNTDRHSIKKNLIGALLFDSGETAEATRLKRTARRRYTRRKNRICYLQEIFSNEMAKVDDSFFHRLEESFLVEEDKKHERHPIFGNIVDEVAYHEKYPTIYHLRKKLVDSTDKADLRLIYLALAHMIKFRGHFLIEGDLNPDNSDVDKLFIQLVQTYNQLFEENPINASGVDAKAILSARLSKSRRLENLIAQLPGEKKNGLFGNLIALSLGLTPNFKSNFDLAEDAKLQLSKDTYDDDLDNLLAQIGDQYADLFLAAKNLSDAILLSDILRVNTEITKAPLSASMIKRYDEHHQDLTLLKALVRQQLPEKYKEIFFDQSKNGYAGYIDGGASQEEFYKFIKPILEKMDGTEELLVKLNREDLLRKQRTFDNGSIPHQIHLGELHAILRRQEDFYPFLKDNREKIEKILTFRIPYYVGPLARGNSRFAWMTRKSEETITPWNFEEVVDKGASAQSFIERMTNFDKNLPNEKVLPKHSLLYEYFTVYNELTKVKYVTEGMRKPAFLSGEQKKAIVDLLFKTNRKVTVKQLKEDYFKKIECFDSVEISGVEDRFNASLGTYHDLLKIIKDKDFLDNEENEDILEDIVLTLTLFEDREMIEERLKTYAHLFDDKVMKQLKRRRYTGWGRLSRKLINGIRDKQSGKTILDFLKSDGFANRNFMQLIHDDSLTFKEDIQKAQVSGQGDSLHEHIANLAGSPAIKKGILQTVKVVDELVKVMGRHKPENIVIEMARENQTTQKGQKNSRERMKRIEEGIKELGSQILKEHPVENTQLQNEKLYLYYLQNGRDMYVDQELDINRLSDYDVDHIVPQSFLKDDSIDNKVLTRSDKARGKSDNVPSEEVVKKMKNYWRQLLNAKLITQRKFDNLTKAERGGLSELDKAGFIKRQLVETRQITKHVAQILDSRMNTKYDENDKLIREVKVITLKSKLVSDFRKDFQFYKVREINNYHHAHDAYLNAVVGTALIKKYPKLESEFVYGDYKVYDVRKMIAKSEQEIGKATAKYFFYSNIMNFFKTEITLANGEIRKRPLIETNGETGEIVWDKGRDFATVRKVLSMPQVNIVKKTEVQTGGFSKESILPKRNSDKLIARKKDWDPKKYGGFDSPTVAYSVLVVAKVEKGKSKKLKSVKELLGITIMERSSFEKNPIDFLEAKGYKEVKKDLIIKLPKYSLFELENGRKRMLASAGELQKGNELALPSKYVNFLYLASHYEKLKGSPEDNEQKQLFVEQHKHYLDEIIEQISEFSKRVILADANLDKVLSAYNKHRDKPIREQAENIIHLFTLTNLGAPAAFKYFDTTIDRKRYTSTKEVLDATLIHQSITGLYETRIDLSQLGGDGGEAAAKGGGGSEAAAKGGGRDIMKDIKVRLMTDSPDDSQDLMIGAIESNLFADQISWKSDQPVWLNQWPLKQEKLQALQQLVTEQLQLGHLEESNSPWNTPVFVIKKKSGKWRLLQDLRAVNATMHDMGALQPGLPSPVAVPKGWEIIIIDLQDCFFNIKLHPEDCKRFAFSVPSPNFKRPYQRFQWKVLPQGMKNSPTLCQKFVDKAILTVRDKYQDSYIVHYMDDILLAHPSRSIVDEILTSMIQALNKHGLVVSTEKIQKYDNLKYLGTHIQGDSVSYQKLQIRTDKLRTLNDFQKLLGNINWIRPFLKLTTGELKPLFEILNGDSNPISTRKLTPEACKALQLMNERLSTARVKRLDLSQPWSLCILKTEYTPTACLWQDGVVEWIHLPHISPKVITPYDIFCTQLIIKGRHRSKELFSKDPDYIVVPYTKVQFDLLLQEKEDWPISLLGFLGEVHFHLPKDPLLTFTLQTAIIFPHMTSTTPLEKGIVIFTDGSANGRSVTYIQGREPIIKENTQNTAQQAEIVAVITAFEEVSQPFNLYTDSKYVTGLFPEIETATLSPRTKIYTELKHLQRLIHKRQEKFYIGHIRGHTGLPGPLAQGNAYADSLTRILTAGKRTADGSEFEKRTADGSEFESPKKKAKVE

SEQ ID NO: 3202 - protein, 2019 aa, synthetic construct
  source 1..2019: note = Description of Artificial Sequence: Synthetic polypeptide
MPAAKRVKLDGGDKKYSIGLDIGTNSVGWAVITDEYKVPSKKFKVLGNTDRHSIKKNLIGALLFDSGETAEATRLKRTARRRYTRRKNRICYLQEIFSNEMAKVDDSFFHRLEESFLVEEDKKHERHPIFGNIVDEVAYHEKYPTIYHLRKKLVDSTDKADLRLIYLALAHMIKFRGHFLIEGDLNPDNSDVDKLFIQLVQTYNQLFEENPINASGVDAKAILSARLSKSRRLENLIAQLPGEKKNGLFGNLIALSLGLTPNFKSNFDLAEDAKLQLSKDTYDDDLDNLLAQIGDQYADLFLAAKNLSDAILLSDILRVNTEITKAPLSASMIKRYDEHHQDLTLLKALVRQQLPEKYKEIFFDQSKNGYAGYIDGGASQEEFYKFIKPILEKMDGTEELLVKLNREDLLRKQRTFDNGSIPHQIHLGELHAILRRQEDFYPFLKDNREKIEKILTFRIPYYVGPLARGNSRFAWMTRKSEETITPWNFEEVVDKGASAQSFIERMTNFDKNLPNEKVLPKHSLLYEYFTVYNELTKVKYVTEGMRKPAFLSGEQKKAIVDLLFKTNRKVTVKQLKEDYFKKIECFDSVEISGVEDRFNASLGTYHDLLKIIKDKDFLDNEENEDILEDIVLTLTLFEDREMIEERLKTYAHLFDDKVMKQLKRRRYTGWGRLSRKLINGIRDKQSGKTILDFLKSDGFANRNFMQLIHDDSLTFKEDIQKAQVSGQGDSLHEHIANLAGSPAIKKGILQTVKVVDELVKVMGRHKPENIVIEMARENQTTQKGQKNSRERMKRIEEGIKELGSQILKEHPVENTQLQNEKLYLYYLQNGRDMYVDQELDINRLSDYDVDHIVPQSFLKDDSIDNKVLTRSDKARGKSDNVPSEEVVKKMKNYWRQLLNAKLITQRKFDNLTKAERGGLSELDKAGFIKRQLVETRQITKHVAQILDSRMNTKYDENDKLIREVKVITLKSKLVSDFRKDFQFYKVREINNYHHAHDAYLNAVVGTALIKKYPKLESEFVYGDYKVYDVRKMIAKSEQEIGKATAKYFFYSNIMNFFKTEITLANGEIRKRPLIETNGETGEIVWDKGRDFATVRKVLSMPQVNIVKKTEVQTGGFSKESILPKRNSDKLIARKKDWDPKKYGGFDSPTVAYSVLVVAKVEKGKSKKLKSVKELLGITIMERSSFEKNPIDFLEAKGYKEVKKDLIIKLPKYSLFELENGRKRMLASAGELQKGNELALPSKYVNFLYLASHYEKLKGSPEDNEQKQLFVEQHKHYLDEIIEQISEFSKRVILADANLDKVLSAYNKHRDKPIREQAENIIHLFTLTNLGAPAAFKYFDTTIDRKRYTSTKEVLDATLIHQSITGLYETRIDLSQLGGDGGGGGPAPGGGRDIMKDIKVRLMTDSPDDSQDLMIGAIESNLFADQISWKSDQPVWLNQWPLKQEKLQALQQLVTEQLQLGHLEESNSPWNTPVFVIKKKSGKWRLLQDLRAVNATMHDMGALQPGLPSPVAVPKGWEIIIIDLQDCFFNIKLHPEDCKRFAFSVPSPNFKRPYQRFQWKVLPQGMKNSPTLCQKFVDKAILTVRDKYQDSYIVHYMDDILLAHPSRSIVDEILTSMIQALNKHGLVVSTEKIQKYDNLKYLGTHIQGDSVSYQKLQIRTDKLRTLNDFQKLLGNINWIRPFLKLTTGELKPLFEILNGDSNPISTRKLTPEACKALQLMNERLSTARVKRLDLSQPWSLCILKTEYTPTACLWQDGVVEWIHLPHISPKVITPYDIFCTQLIIKGRHRSKELFSKDPDYIVVPYTKVQFDLLLQEKEDWPISLLGFLGEVHFHLPKDPLLTFTLQTAIIFPHMTSTTPLEKGIVIFTDGSANGRSVTYIQGREPIIKENTQNTAQQAEIVAVITAFEEVSQPFNLYTDSKYVTGLFPEIETATLSPRTKIYTELKHLQRLIHKRQEKFYIGHIRGHTGLPGPLAQGNAYADSLTRILTAGKRTADGSEFEKRTADGSEFESPKKKAKVE

SEQ ID NO: 3203 - protein, 2028 aa, synthetic construct
  source 1..2028: note = Description of Artificial Sequence: Synthetic polypeptide
MPAAKRVKLDGGDKKYSIGLDIGTNSVGWAVITDEYKVPSKKFKVLGNTDRHSIKKNLIGALLFDSGETAEATRLKRTARRRYTRRKNRICYLQEIFSNEMAKVDDSFFHRLEESFLVEEDKKHERHPIFGNIVDEVAYHEKYPTIYHLRKKLVDSTDKADLRLIYLALAHMIKFRGHFLIEGDLNPDNSDVDKLFIQLVQTYNQLFEENPINASGVDAKAILSARLSKSRRLENLIAQLPGEKKNGLFGNLIALSLGLTPNFKSNFDLAEDAKLQLSKDTYDDDLDNLLAQIGDQYADLFLAAKNLSDAILLSDILRVNTEITKAPLSASMIKRYDEHHQDLTLLKALVRQQLPEKYKEIFFDQSKNGYAGYIDGGASQEEFYKFIKPILEKMDGTEELLVKLNREDLLRKQRTFDNGSIPHQIHLGELHAILRRQEDFYPFLKDNREKIEKILTFRIPYYVGPLARGNSRFAWMTRKSEETITPWNFEEVVDKGASAQSFIERMTNFDKNLPNEKVLPKHSLLYEYFTVYNELTKVKYVTEGMRKPAFLSGEQKKAIVDLLFKTNRKVTVKQLKEDYFKKIECFDSVEISGVEDRFNASLGTYHDLLKIIKDKDFLDNEENEDILEDIVLTLTLFEDREMIEERLKTYAHLFDDKVMKQLKRRRYTGWGRLSRKLINGIRDKQSGKTILDFLKSDGFANRNFMQLIHDDSLTFKEDIQKAQVSGQGDSLHEHIANLAGSPAIKKGILQTVKVVDELVKVMGRHKPENIVIEMARENQTTQKGQKNSRERMKRIEEGIKELGSQILKEHPVENTQLQNEKLYLYYLQNGRDMYVDQELDINRLSDYDVDHIVPQSFLKDDSIDNKVLTRSDKARGKSDNVPSEEVVKKMKNYWRQLLNAKLITQRKFDNLTKAERGGLSELDKAGFIKRQLVETRQITKHVAQILDSRMNTKYDENDKLIREVKVITLKSKLVSDFRKDFQFYKVREINNYHHAHDAYLNAVVGTALIKKYPKLESEFVYGDYKVYDVRKMIAKSEQEIGKATAKYFFYSNIMNFFKTEITLANGEIRKRPLIETNGETGEIVWDKGRDFATVRKVLSMPQVNIVKKTEVQTGGFSKESILPKRNSDKLIARKKDWDPKKYGGFDSPTVAYSVLVVAKVEKGKSKKLKSVKELLGITIMERSSFEKNPIDFLEAKGYKEVKKDLIIKLPKYSLFELENGRKRMLASAGELQKGNELALPSKYVNFLYLASHYEKLKGSPEDNEQKQLFVEQHKHYLDEIIEQISEFSKRVILADANLDKVLSAYNKHRDKPIREQAENIIHLFTLTNLGAPAAFKYFDTTIDRKRYTSTKEVLDATLIHQSITGLYETRIDLSQLGGDGGGGGGSGGGGSGGGGSGGGRDIMKDIKVRLMTDSPDDSQDLMIGAIESNLFADQISWKSDQPVWLNQWPLKQEKLQALQQLVTEQLQLGHLEESNSPWNTPVFVIKKKSGKWRLLQDLRAVNATMHDMGALQPGLPSPVAVPKGWEIIIIDLQDCFFNIKLHPEDCKRFAFSVPSPNFKRPYQRFQWKVLPQGMKNSPTLCQKFVDKAILTVRDKYQDSYIVHYMDDILLAHPSRSIVDEILTSMIQALNKHGLVVSTEKIQKYDNLKYLGTHIQGDSVSYQKLQIRTDKLRTLNDFQKLLGNINWIRPFLKLTTGELKPLFEILNGDSNPISTRKLTPEACKALQLMNERLSTARVKRLDLSQPWSLCILKTEYTPTACLWQDGVVEWIHLPHISPKVITPYDIFCTQLIIKGRHRSKELFSKDPDYIVVPYTKVQFDLLLQEKEDWPISLLGFLGEVHFHLPKDPLLTFTLQTAIIFPHMTSTTPLEKGIVIFTDGSANGRSVTYIQGREPIIKENTQNTAQQAEIVAVITAFEEVSQPFNLYTDSKYVTGLFPEIETATLSPRTKIYTELKHLQRLIHKRQEKFYIGHIRGHTGLPGPLAQGNAYADSLTRILTAGKRTADGSEFEKRTADGSEFESPKKKAKVE

SEQ ID NO: 3204 - protein, 2022 aa, synthetic construct
  source 1..2022: note = Description of Artificial Sequence: Synthetic polypeptide
MPAAKRVKLDGGDKKYSIGLDIGTNSVGWAVITDEYKVPSKKFKVLGNTDRHSIKKNLIGALLFDSGETAEATRLKRTARRRYTRRKNRICYLQEIFSNEMAKVDDSFFHRLEESFLVEEDKKHERHPIFGNIVDEVAYHEKYPTIYHLRKKLVDSTDKADLRLIYLALAHMIKFRGHFLIEGDLNPDNSDVDKLFIQLVQTYNQLFEENPINASGVDAKAILSARLSKSRRLENLIAQLPGEKKNGLFGNLIALSLGLTPNFKSNFDLAEDAKLQLSKDTYDDDLDNLLAQIGDQYADLFLAAKNLSDAILLSDILRVNTEITKAPLSASMIKRYDEHHQDLTLLKALVRQQLPEKYKEIFFDQSKNGYAGYIDGGASQEEFYKFIKPILEKMDGTEELLVKLNREDLLRKQRTFDNGSIPHQIHLGELHAILRRQEDFYPFLKDNREKIEKILTFRIPYYVGPLARGNSRFAWMTRKSEETITPWNFEEVVDKGASAQSFIERMTNFDKNLPNEKVLPKHSLLYEYFTVYNELTKVKYVTEGMRKPAFLSGEQKKAIVDLLFKTNRKVTVKQLKEDYFKKIECFDSVEISGVEDRFNASLGTYHDLLKIIKDKDFLDNEENEDILEDIVLTLTLFEDREMIEERLKTYAHLFDDKVMKQLKRRRYTGWGRLSRKLINGIRDKQSGKTILDFLKSDGFANRNFMQLIHDDSLTFKEDIQKAQVSGQGDSLHEHIANLAGSPAIKKGILQTVKVVDELVKVMGRHKPENIVIEMARENQTTQKGQKNSRERMKRIEEGIKELGSQILKEHPVENTQLQNEKLYLYYLQNGRDMYVDQELDINRLSDYDVDHIVPQSFLKDDSIDNKVLTRSDKARGKSDNVPSEEVVKKMKNYWRQLLNAKLITQRKFDNLTKAERGGLSELDKAGFIKRQLVETRQITKHVAQILDSRMNTKYDENDKLIREVKVITLKSKLVSDFRKDFQFYKVREINNYHHAHDAYLNAVVGTALIKKYPKLESEFVYGDYKVYDVRKMIAKSEQEIGKATAKYFFYSNIMNFFKTEITLANGEIRKRPLIETNGETGEIVWDKGRDFATVRKVLSMPQVNIVKKTEVQTGGFSKESILPKRNSDKLIARKKDWDPKKYGGFDSPTVAYSVLVVAKVEKGKSKKLKSVKELLGITIMERSSFEKNPIDFLEAKGYKEVKKDLIIKLPKYSLFELENGRKRMLASAGELQKGNELALPSKYVNFLYLASHYEKLKGSPEDNEQKQLFVEQHKHYLDEIIEQISEFSKRVILADANLDKVLSAYNKHRDKPIREQAENIIHLFTLTNLGAPAAFKYFDTTIDRKRYTSTKEVLDATLIHQSITGLYETRIDLSQLGGDGGGSSGGGPAPGGGRDIMKDIKVRLMTDSPDDSQDLMIGAIESNLFADQISWKSDQPVWLNQWPLKQEKLQALQQLVTEQLQLGHLEESNSPWNTPVFVIKKKSGKWRLLQDLRAVNATMHDMGALQPGLPSPVAVPKGWEIIIIDLQDCFFNIKLHPEDCKRFAFSVPSPNFKRPYQRFQWKVLPQGMKNSPTLCQKFVDKAILTVRDKYQDSYIVHYMDDILLAHPSRSIVDEILTSMIQALNKHGLVVSTEKIQKYDNLKYLGTHIQGDSVSYQKLQIRTDKLRTLNDFQKLLGNINWIRPFLKLTTGELKPLFEILNGDSNPISTRKLTPEACKALQLMNERLSTARVKRLDLSQPWSLCILKTEYTPTACLWQDGVVEWIHLPHISPKVITPYDIFCTQLIIKGRHRSKELFSKDPDYIVVPYTKVQFDLLLQEKEDWPISLLGFLGEVHFHLPKDPLLTFTLQTAIIFPHMTSTTPLEKGIVIFTDGSANGRSVTYIQGREPIIKENTQNTAQQAEIVAVITAFEEVSQPFNLYTDSKYVTGLFPEIETATLSPRTKIYTELKHLQRLIHKRQEKFYIGHIRGHTGLPGPLAQGNAYADSLTRILTAGKRTADGSEFEKRTADGSEFESPKKKAKVE

SEQ ID NO: 3205 - protein, 2022 aa, synthetic construct
  source 1..2022: note = Description of Artificial Sequence: Synthetic polypeptide
MPAAKRVKLDGGDKKYSIGLDIGTNSVGWAVITDEYKVPSKKFKVLGNTDRHSIKKNLIGALLFDSGETAEATRLKRTARRRYTRRKNRICYLQEIFSNEMAKVDDSFFHRLEESFLVEEDKKHERHPIFGNIVDEVAYHEKYPTIYHLRKKLVDSTDKADLRLIYLALAHMIKFRGHFLIEGDLNPDNSDVDKLFIQLVQTYNQLFEENPINASGVDAKAILSARLSKSRRLENLIAQLPGEKKNGLFGNLIALSLGLTPNFKSNFDLAEDAKLQLSKDTYDDDLDNLLAQIGDQYADLFLAAKNLSDAILLSDILRVNTEITKAPLSASMIKRYDEHHQDLTLLKALVRQQLPEKYKEIFFDQSKNGYAGYIDGGASQEEFYKFIKPILEKMDGTEELLVKLNREDLLRKQRTFDNGSIPHQIHLGELHAILRRQEDFYPFLKDNREKIEKILTFRIPYYVGPLARGNSRFAWMTRKSEETITPWNFEEVVDKGASAQSFIERMTNFDKNLPNEKVLPKHSLLYEYFTVYNELTKVKYVTEGMRKPAFLSGEQKKAIVDLLFKTNRKVTVKQLKEDYFKKIECFDSVEISGVEDRFNASLGTYHDLLKIIKDKDFLDNEENEDILEDIVLTLTLFEDREMIEERLKTYAHLFDDKVMKQLKRRRYTGWGRLSRKLINGIRDKQSGKTILDFLKSDGFANRNFMQLIHDDSLTFKEDIQKAQVSGQGDSLHEHIANLAGSPAIKKGILQTVKVVDELVKVMGRHKPENIVIEMARENQTTQKGQKNSRERMKRIEEGIKELGSQILKEHPVENTQLQNEKLYLYYLQNGRDMYVDQELDINRLSDYDVDHIVPQSFLKDDSIDNKVLTRSDKARGKSDNVPSEEVVKKMKNYWRQLLNAKLITQRKFDNLTKAERGGLSELDKAGFIKRQLVETRQITKHVAQILDSRMNTKYDENDKLIREVKVITLKSKLVSDFRKDFQFYKVREINNYHHAHDAYLNAVVGTALIKKYPKLESEFVYGDYKVYDVRKMIAKSEQEIGKATAKYFFYSNIMNFFKTEITLANGEIRKRPLIETNGETGEIVWDKGRDFATVRKVLSMPQVNIVKKTEVQTGGFSKESILPKRNSDKLIARKKDWDPKKYGGFDSPTVAYSVLVVAKVEKGKSKKLKSVKELLGITIMERSSFEKNPIDFLEAKGYKEVKKDLIIKLPKYSLFELENGRKRMLASAGELQKGNELALPSKYVNFLYLASHYEKLKGSPEDNEQKQLFVEQHKHYLDEIIEQISEFSKRVILADANLDKVLSAYNKHRDKPIREQAENIIHLFTLTNLGAPAAFKYFDTTIDRKRYTSTKEVLDATLIHQSITGLYETRIDLSQLGGDGGGSSGGSGGGGGGRDIMKDIKVRLMTDSPDDSQDLMIGAIESNLFADQISWKSDQPVWLNQWPLKQEKLQALQQLVTEQLQLGHLEESNSPWNTPVFVIKKKSGKWRLLQDLRAVNATMHDMGALQPGLPSPVAVPKGWEIIIIDLQDCFFNIKLHPEDCKRFAFSVPSPNFKRPYQRFQWKVLPQGMKNSPTLCQKFVDKAILTVRDKYQDSYIVHYMDDILLAHPSRSIVDEILTSMIQALNKHGLVVSTEKIQKYDNLKYLGTHIQGDSVSYQKLQIRTDKLRTLNDFQKLLGNINWIRPFLKLTTGELKPLFEILNGDSNPISTRKLTPEACKALQLMNERLSTARVKRLDLSQPWSLCILKTEYTPTACLWQDGVVEWIHLPHISPKVITPYDIFCTQLIIKGRHRSKELFSKDPDYIVVPYTKVQFDLLLQEKEDWPISLLGFLGEVHFHLPKDPLLTFTLQTAIIFPHMTSTTPLEKGIVIFTDGSANGRSVTYIQGREPIIKENTQNTAQQAEIVAVITAFEEVSQPFNLYTDSKYVTGLFPEIETATLSPRTKIYTELKHLQRLIHKRQEKFYIGHIRGHTGLPGPLAQGNAYADSLTRILTAGKRTADGSEFEKRTADGSEFESPKKKAKVE

SEQ ID NO: 3206 - protein, 2021 aa, synthetic construct
  source 1..2021: note = Description of Artificial Sequence: Synthetic polypeptide
MPAAKRVKLDGGDKKYSIGLDIGTNSVGWAVITDEYKVPSKKFKVLGNTDRHSIKKNLIGALLFDSGETAEATRLKRTARRRYTRRKNRICYLQEIFSNEMAKVDDSFFHRLEESFLVEEDKKHERHPIFGNIVDEVAYHEKYPTIYHLRKKLVDSTDKADLRLIYLALAHMIKFRGHFLIEGDLNPDNSDVDKLFIQLVQTYNQLFEENPINASGVDAKAILSARLSKSRRLENLIAQLPGEKKNGLFGNLIALSLGLTPNFKSNFDLAEDAKLQLSKDTYDDDLDNLLAQIGDQYADLFLAAKNLSDAILLSDILRVNTEITKAPLSASMIKRYDEHHQDLTLLKALVRQQLPEKYKEIFFDQSKNGYAGYIDGGASQEEFYKFIKPILEKMDGTEELLVKLNREDLLRKQRTFDNGSIPHQIHLGELHAILRRQEDFYPFLKDNREKIEKILTFRIPYYVGPLARGNSRFAWMTRKSEETITPWNFEEVVDKGASAQSFIERMTNFDKNLPNEKVLPKHSLLYEYFTVYNELTKVKYVTEGMRKPAFLSGEQKKAIVDLLFKTNRKVTVKQLKEDYFKKIECFDSVEISGVEDRFNASLGTYHDLLKIIKDKDFLDNEENEDILEDIVLTLTLFEDREMIEERLKTYAHLFDDKVMKQLKRRRYTGWGRLSRKLINGIRDKQSGKTILDFLKSDGFANRNFMQLIHDDSLTFKEDIQKAQVSGQGDSLHEHIANLAGSPAIKKGILQTVKVVDELVKVMGRHKPENIVIEMARENQTTQKGQKNSRERMKRIEEGIKELGSQILKEHPVENTQLQNEKLYLYYLQNGRDMYVDQELDINRLSDYDVDHIVPQSFLKDDSIDNKVLTRSDKARGKSDNVPSEEVVKKMKNYWRQLLNAKLITQRKFDNLTKAERGGLSELDKAGFIKRQLVETRQITKHVAQILDSRMNTKYDENDKLIREVKVITLKSKLVSDFRKDFQFYKVREINNYHHAHDAYLNAVVGTALIKKYPKLESEFVYGDYKVYDVRKMIAKSEQEIGKATAKYFFYSNIMNFFKTEITLANGEIRKRPLIETNGETGEIVWDKGRDFATVRKVLSMPQVNIVKKTEVQTGGFSKESILPKRNSDKLIARKKDWDPKKYGGFDSPTVAYSVLVVAKVEKGKSKKLKSVKELLGITIMERSSFEKNPIDFLEAKGYKEVKKDLIIKLPKYSLFELENGRKRMLASAGELQKGNELALPSKYVNFLYLASHYEKLKGSPEDNEQKQLFVEQHKHYLDEIIEQISEFSKRVILADANLDKVLSAYNKHRDKPIREQAENIIHLFTLTNLGAPAAFKYFDTTIDRKRYTSTKEVLDATLIHQSITGLYETRIDLSQLGGDGGEAAAKGGSGGGRDIMKDIKVRLMTDSPDDSQDLMIGAIESNLFADQISWKSDQPVWLNQWPLKQEKLQALQQLVTEQLQLGHLEESNSPWNTPVFVIKKKSGKWRLLQDLRAVNATMHDMGALQPGLPSPVAVPKGWEIIIIDLQDCFFNIKLHPEDCKRFAFSVPSPNFKRPYQRFQWKVLPQGMKNSPTLCQKFVDKAILTVRDKYQDSYIVHYMDDILLAHPSRSIVDEILTSMIQALNKHGLVVSTEKIQKYDNLKYLGTHIQGDSVSYQKLQIRTDKLRTLNDFQKLLGNINWIRPFLKLTTGELKPLFEILNGDSNPISTRKLTPEACKALQLMNERLSTARVKRLDLSQPWSLCILKTEYTPTACLWQDGVVEWIHLPHISPKVITPYDIFCTQLIIKGRHRSKELFSKDPDYIVVPYTKVQFDLLLQEKEDWPISLLGFLGEVHFHLPKDPLLTFTLQTAIIFPHMTSTTPLEKGIVIFTDGSANGRSVTYIQGREPIIKENTQNTAQQAEIVAVITAFEEVSQPFNLYTDSKYVTGLFPEIETATLSPRTKIYTELKHLQRLIHKRQEKFYIGHIRGHTGLPGPLAQGNAYADSLTRILTAGKRTADGSEFEKRTADGSEFESPKKKAKVE

SEQ ID NO: 3207 - protein, 2024 aa, synthetic construct
  source 1..2024: note = Description of Artificial Sequence: Synthetic polypeptide
MPAAKRVKLDGGDKKYSIGLDIGTNSVGWAVITDEYKVPSKKFKVLGNTDRHSIKKNLIGALLFDSGETAEATRLKRTARRRYTRRKNRICYLQEIFSNEMAKVDDSFFHRLEESFLVEEDKKHERHPIFGNIVDEVAYHEKYPTIYHLRKKLVDSTDKADLRLIYLALAHMIKFRGHFLIEGDLNPDNSDVDKLFIQLVQTYNQLFEENPINASGVDAKAILSARLSKSRRLENLIAQLPGEKKNGLFGNLIALSLGLTPNFKSNFDLAEDAKLQLSKDTYDDDLDNLLAQIGDQYADLFLAAKNLSDAILLSDILRVNTEITKAPLSASMIKRYDEHHQDLTLLKALVRQQLPEKYKEIFFDQSKNGYAGYIDGGASQEEFYKFIKPILEKMDGTEELLVKLNREDLLRKQRTFDNGSIPHQIHLGELHAILRRQEDFYPFLKDNREKIEKILTFRIPYYVGPLARGNSRFAWMTRKSEETITPWNFEEVVDKGASAQSFIERMTNFDKNLPNEKVLPKHSLLYEYFTVYNELTKVKYVTEGMRKPAFLSGEQKKAIVDLLFKTNRKVTVKQLKEDYFKKIECFDSVEISGVEDRFNASLGTYHDLLKIIKDKDFLDNEENEDILEDIVLTLTLFEDREMIEERLKTYAHLFDDKVMKQLKRRRYTGWGRLSRKLINGIRDKQSGKTILDFLKSDGFANRNFMQLIHDDSLTFKEDIQKAQVSGQGDSLHEHIANLAGSPAIKKGILQTVKVVDELVKVMGRHKPENIVIEMARENQTTQKGQKNSRERMKRIEEGIKELGSQILKEHPVENTQLQNEKLYLYYLQNGRDMYVDQELDINRLSDYDVDHIVPQSFLKDDSIDNKVLTRSDKARGKSDNVPSEEVVKKMKNYWRQLLNAKLITQRKFDNLTKAERGGLSELDKAGFIKRQLVETRQITKHVAQILDSRMNTKYDENDKLIREVKVITLKSKLVSDFRKDFQFYKVREINNYHHAHDAYLNAVVGTALIKKYPKLESEFVYGDYKVYDVRKMIAKSEQEIGKATAKYFFYSNIMNFFKTEITLANGEIRKRPLIETNGETGEIVWDKGRDFATVRKVLSMPQVNIVKKTEVQTGGFSKESILPKRNSDKLIARKKDWDPKKYGGFDSPTVAYSVLVVAKVEKGKSKKLKSVKELLGITIMERSSFEKNPIDFLEAKGYKEVKKDLIIKLPKYSLFELENGRKRMLASAGELQKGNELALPSKYVNFLYLASHYEKLKGSPEDNEQKQLFVEQHKHYLDEIIEQISEFSKRVILADANLDKVLSAYNKHRDKPIREQAENIIHLFTLTNLGAPAAFKYFDTTIDRKRYTSTKEVLDATLIHQSITGLYETRIDLSQLGGDGGGSSEAAAKPAPGGGRDIMKDIKVRLMTDSPDDSQDLMIGAIESNLFADQISWKSDQPVWLNQWPLKQEKLQALQQLVTEQLQLGHLEESNSPWNTPVFVIKKKSGKWRLLQDLRAVNATMHDMGALQPGLPSPVAVPKGWEIIIIDLQDCFFNIKLHPEDCKRFAFSVPSPNFKRPYQRFQWKVLPQGMKNSPTLCQKFVDKAILTVRDKYQDSYIVHYMDDILLAHPSRSIVDEILTSMIQALNKHGLVVSTEKIQKYDNLKYLGTHIQGDSVSYQKLQIRTDKLRTLNDFQKLLGNINWIRPFLKLTTGELKPLFEILNGDSNPISTRKLTPEACKALQLMNERLSTARVKRLDLSQPWSLCILKTEYTPTACLWQDGVVEWIHLPHISPKVITPYDIFCTQLIIKGRHRSKELFSKDPDYIVVPYTKVQFDLLLQEKEDWPISLLGFLGEVHFHLPKDPLLTFTLQTAIIFPHMTSTTPLEKGIVIFTDGSANGRSVTYIQGREPIIKENTQNTAQQAEIVAVITAFEEVSQPFNLYTDSKYVTGLFPEIETATLSPRTKIYTELKHLQRLIHKRQEKFYIGHIRGHTGLPGPLAQGNAYADSLTRILTAGKRTADGSEFEKRTADGSEFESPKKKAKVE

SEQ ID NO: 3208 - protein, 2021 aa, synthetic construct
  source 1..2021: note = Description of Artificial Sequence: Synthetic polypeptide
MPAAKRVKLDGGDKKYSIGLDIGTNSVGWAVITDEYKVPSKKFKVLGNTDRHSIKKNLIGALLFDSGETAEATRLKRTARRRYTRRKNRICYLQEIFSNEMAKVDDSFFHRLEESFLVEEDKKHERHPIFGNIVDEVAYHEKYPTIYHLRKKLVDSTDKADLRLIYLALAHMIKFRGHFLIEGDLNPDNSDVDKLFIQLVQTYNQLFEENPINASGVDAKAILSARLSKSRRLENLIAQLPGEKKNGLFGNLIALSLGLTPNFKSNFDLAEDAKLQLSKDTYDDDLDNLLAQIGDQYADLFLAAKNLSDAILLSDILRVNTEITKAPLSASMIKRYDEHHQDLTLLKALVRQQLPEKYKEIFFDQSKNGYAGYIDGGASQEEFYKFIKPILEKMDGTEELLVKLNREDLLRKQRTFDNGSIPHQIHLGELHAILRRQEDFYPFLKDNREKIEKILTFRIPYYVGPLARGNSRFAWMTRKSEETITPWNFEEVVDKGASAQSFIERMTNFDKNLPNEKVLPKHSLLYEYFTVYNELTKVKYVTEGMRKPAFLSGEQKKAIVDLLFKTNRKVTVKQLKEDYFKKIECFDSVEISGVEDRFNASLGTYHDLLKIIKDKDFLDNEENEDILEDIVLTLTLFEDREMIEERLKTYAHLFDDKVMKQLKRRRYTGWGRLSRKLINGIRDKQSGKTILDFLKSDGFANRNFMQLIHDDSLTFKEDIQKAQVSGQGDSLHEHIANLAGSPAIKKGILQTVKVVDELVKVMGRHKPENIVIEMARENQTTQKGQKNSRERMKRIEEGIKELGSQILKEHPVENTQLQNEKLYLYYLQNGRDMYVDQELDINRLSDYDVDHIVPQSFLKDDSIDNKVLTRSDKARGKSDNVPSEEVVKKMKNYWRQLLNAKLITQRKFDNLTKAERGGLSELDKAGFIKRQLVETRQITKHVAQILDSRMNTKYDENDKLIREVKVITLKSKLVSDFRKDFQFYKVREINNYHHAHDAYLNAVVGTALIKKYPKLESEFVYGDYKVYDVRKMIAKSEQEIGKATAKYFFYSNIMNFFKTEITLANGEIRKRPLIETNGETGEIVWDKGRDFATVRKVLSMPQVNIVKKTEVQTGGFSKESILPKRNSDKLIARKKDWDPKKYGGFDSPTVAYSVLVVAKVEKGKSKKLKSVKELLGITIMERSSFEKNPIDFLEAKGYKEVKKDLIIKLPKYSLFELENGRKRMLASAGELQKGNELALPSKYVNFLYLASHYEKLKGSPEDNEQKQLFVEQHKHYLDEIIEQISEFSKRVILADANLDKVLSAYNKHRDKPIREQAENIIHLFTLTNLGAPAAFKYFDTTIDRKRYTSTKEVLDATLIHQSITGLYETRIDLSQLGGDGGGGGEAAAKGGGRDIMKDIKVRLMTDSPDDSQDLMIGAIESNLFADQISWKSDQPVWLNQWPLKQEKLQALQQLVTEQLQLGHLEESNSPWNTPVFVIKKKSGKWRLLQDLRAVNATMHDMGALQPGLPSPVAVPKGWEIIIIDLQDCFFNIKLHPEDCKRFAFSVPSPNFKRPYQRFQWKVLPQGMKNSPTLCQKFVDKAILTVRDKYQDSYIVHYMDDILLAHPSRSIVDEILTSMIQALNKHGLVVSTEKIQKYDNLKYLGTHIQGDSVSYQKLQIRTDKLRTLNDFQKLLGNINWIRPFLKLTTGELKPLFEILNGDSNPISTRKLTPEACKALQLMNERLSTARVKRLDLSQPWSLCILKTEYTPTACLWQDGVVEWIHLPHISPKVITPYDIFCTQLIIKGRHRSKELFSKDPDYIVVPYTKVQFDLLLQEKEDWPISLLGFLGEVHFHLPKDPLLTFTLQTAIIFPHMTSTTPLEKGIVIFTDGSANGRSVTYIQGREPIIKENTQNTAQQAEIVAVITAFEEVSQPFNLYTDSKYVTGLFPEIETATLSPRTKIYTELKHLQRLIHKRQEKFYIGHIRGHTGLPGPLAQGNAYADSLTRILTAGKRTADGSEFEKRTADGSEFESPKKKAKVE

SEQ ID NO: 3209 - protein, 2022 aa, synthetic construct
  source 1..2022: note = Description of Artificial Sequence: Synthetic polypeptide
MPAAKRVKLDGGDKKYSIGLDIGTNSVGWAVITDEYKVPSKKFKVLGNTDRHSIKKNLIGALLFDSGETAEATRLKRTARRRYTRRKNRICYLQEIFSNEMAKVDDSFFHRLEESFLVEEDKKHERHPIFGNIVDEVAYHEKYPTIYHLRKKLVDSTDKADLRLIYLALAHMIKFRGHFLIEGDLNPDNSDVDKLFIQLVQTYNQLFEENPINASGVDAKAILSARLSKSRRLENLIAQLPGEKKNGLFGNLIALSLGLTPNFKSNFDLAEDAKLQLSKDTYDDDLDNLLAQIGDQYADLFLAAKNLSDAILLSDILRVNTEITKAPLSASMIKRYDEHHQDLTLLKALVRQQLPEKYKEIFFDQSKNGYAGYIDGGASQEEFYKFIKPILEKMDGTEELLVKLNREDLLRKQRTFDNGSIPHQIHLGELHAILRRQEDFYPFLKDNREKIEKILTFRIPYYVGPLARGNSRFAWMTRKSEETITPWNFEEVVDKGASAQSFIERMTNFDKNLPNEKVLPKHSLLYEYFTVYNELTKVKYVTEGMRKPAFLSGEQKKAIVDLLFKTNRKVTVKQLKEDYFKKIECFDSVEISGVEDRFNASLGTYHDLLKIIKDKDFLDNEENEDILEDIVLTLTLFEDREMIEERLKTYAHLFDDKVMKQLKRRRYTGWGRLSRKLINGIRDKQSGKTILDFLKSDGFANRNFMQLIHDDSLTFKEDIQKAQVSGQGDSLHEHIANLAGSPAIKKGILQTVKVVDELVKVMGRHKPENIVIEMARENQTTQKGQKNSRERMKRIEEGIKELGSQILKEHPVENTQLQNEKLYLYYLQNGRDMYVDQELDINRLSDYDVDHIVPQSFLKDDSIDNKVLTRSDKARGKSDNVPSEEVVKKMKNYWRQLLNAKLITQRKFDNLTKAERGGLSELDKAGFIKRQLVETRQITKHVAQILDSRMNTKYDENDKLIREVKVITLKSKLVSDFRKDFQFYKVREINNYHHAHDAYLNAVVGTALIKKYPKLESEFVYGDYKVYDVRKMIAKSEQEIGKATAKYFFYSNIMNFFKTEITLANGEIRKRPLIETNGETGEIVWDKGRDFATVRKVLSMPQVNIVKKTEVQTGGFSKESILPKRNSDKLIARKKDWDPKKYGGFDSPTVAYSVLVVAKVEKGKSKKLKSVKELLGITIMERSSFEKNPIDFLEAKGYKEVKKDLIIKLPKYSLFELENGRKRMLASAGELQKGNELALPSKYVNFLYLASHYEKLKGSPEDNEQKQLFVEQHKHYLDEIIEQISEFSKRVILADANLDKVLSAYNKHRDKPIREQAENIIHLFTLTNLGAPAAFKYFDTTIDRKRYTSTKEVLDATLIHQSITGLYETRIDLSQLGGDGGPAPGGSGSSGGGRDIMKDIKVRLMTDSPDDSQDLMIGAIESNLFADQISWKSDQPVWLNQWPLKQEKLQALQQLVTEQLQLGHLEESNSPWNTPVFVIKKKSGKWRLLQDLRAVNATMHDMGALQPGLPSPVAVPKGWEIIIIDLQDCFFNIKLHPEDCKRFAFSVPSPNFKRPYQRFQWKVLPQGMKNSPTLCQKFVDKAILTVRDKYQDSYIVHYMDDILLAHPSRSIVDEILTSMIQALNKHGLVVSTEKIQKYDNLKYLGTHIQGDSVSYQKLQIRTDKLRTLNDFQKLLGNINWIRPFLKLTTGELKPLFEILNGDSNPISTRKLTPEACKALQLMNERLSTARVKRLDLSQPWSLCILKTEYTPTACLWQDGVVEWIHLPHISPKVITPYDIFCTQLIIKGRHRSKELFSKDPDYIVVPYTKVQFDLLLQEKEDWPISLLGFLGEVHFHLPKDPLLTFTLQTAIIFPHMTSTTPLEKGIVIFTDGSANGRSVTYIQGREPIIKENTQNTAQQAEIVAVITAFEEVSQPFNLYTDSKYVTGLFPEIETATLSPRTKIYTELKHLQRLIHKRQEKFYIGHIRGHTGLPGPLAQGNAYADSLTRILTAGKRTADGSEFEKRTADGSEFESPKKKAKVE

SEQ ID NO: 3210 - protein, 2016 aa, synthetic construct
  source 1..2016: note = Description of Artificial Sequence: Synthetic polypeptide
MPAAKRVKLDGGDKKYSIGLDIGTNSVGWAVITDEYKVPSKKFKVLGNTDRHSIKKNLIGALLFDSGETAEATRLKRTARRRYTRRKNRICYLQEIFSNEMAKVDDSFFHRLEESFLVEEDKKHERHPIFGNIVDEVAYHEKYPTIYHLRKKLVDSTDKADLRLIYLALAHMIKFRGHFLIEGDLNPDNSDVDKLFIQLVQTYNQLFEENPINASGVDAKAILSARLSKSRRLENLIAQLPGEKKNGLFGNLIALSLGLTPNFKSNFDLAEDAKLQLSKDTYDDDLDNLLAQIGDQYADLFLAAKNLSDAILLSDILRVNTEITKAPLSASMIKRYDEHHQDLTLLKALVRQQLPEKYKEIFFDQSKNGYAGYIDGGASQEEFYKFIKPILEKMDGTEELLVKLNREDLLRKQRTFDNGSIPHQIHLGELHAILRRQEDFYPFLKDNREKIEKILTFRIPYYVGPLARGNSRFAWMTRKSEETITPWNFEEVVDKGASAQSFIERMTNFDKNLPNEKVLPKHSLLYEYFTVYNELTKVKYVTEGMRKPAFLSGEQKKAIVDLLFKTNRKVTVKQLKEDYFKKIECFDSVEISGVEDRFNASLGTYHDLLKIIKDKDFLDNEENEDILEDIVLTLTLFEDREMIEERLKTYAHLFDDKVMKQLKRRRYTGWGRLSRKLINGIRDKQSGKTILDFLKSDGFANRNFMQLIHDDSLTFKEDIQKAQVSGQGDSLHEHIANLAGSPAIKKGILQTVKVVDELVKVMGRHKPENIVIEMARENQTTQKGQKNSRERMKRIEEGIKELGSQILKEHPVENTQLQNEKLYLYYLQNGRDMYVDQELDINRLSDYDVDHIVPQSFLKDDSIDNKVLTRSDKARGKSDNVPSEEVVKKMKNYWRQLLNAKLITQRKFDNLTKAERGGLSELDKAGFIKRQLVETRQITKHVAQILDSRMNTKYDENDKLIREVKVITLKSKLVSDFRKDFQFYKVREINNYHHAHDAYLNAVVGTALIKKYPKLESEFVYGDYKVYDVRKMIAKSEQEIGKATAKYFFYSNIMNFFKTEITLANGEIRKRPLIETNGETGEIVWDKGRDFATVRKVLSMPQVNIVKKTEVQTGGFSKESILPKRNSDKLIARKKDWDPKKYGGFDSPTVAYSVLVVAKVEKGKSKKLKSVKELLGITIMERSSFEKNPIDFLEAKGYKEVKKDLIIKLPKYSLFELENGRKRMLASAGELQKGNELALPSKYVNFLYLASHYEKLKGSPEDNEQKQLFVEQHKHYLDEIIEQISEFSKRVILADANLDKVLSAYNKHRDKPIREQAENIIHLFTLTNLGAPAAFKYFDTTIDRKRYTSTKEVLDATLIHQSITGLYETRIDLSQLGGDGGGGGGGGRDIMKDIKVRLMTDSPDDSQDLMIGAIESNLFADQISWKSDQPVWLNQWPLKQEKLQALQQLVTEQLQLGHLEESNSPWNTPVFVIKKKSGKWRLLQDLRAVNATMHDMGALQPGLPSPVAVPKGWEIIIIDLQDCFFNIKLHPEDCKRFAFSVPSPNFKRPYQRFQWKVLPQGMKNSPTLCQKFVDKAILTVRDKYQDSYIVHYMDDILLAHPSRSIVDEILTSMIQALNKHGLVVSTEKIQKYDNLKYLGTHIQGDSVSYQKLQIRTDKLRTLNDFQKLLGNINWIRPFLKLTTGELKPLFEILNGDSNPISTRKLTPEACKALQLMNERLSTARVKRLDLSQPWSLCILKTEYTPTACLWQDGVVEWIHLPHISPKVITPYDIFCTQLIIKGRHRSKELFSKDPDYIVVPYTKVQFDLLLQEKEDWPISLLGFLGEVHFHLPKDPLLTFTLQTAIIFPHMTSTTPLEKGIVIFTDGSANGRSVTYIQGREPIIKENTQNTAQQAEIVAVITAFEEVSQPFNLYTDSKYVTGLFPEIETATLSPRTKIYTELKHLQRLIHKRQEKFYIGHIRGHTGLPGPLAQGNAYADSLTRILTAGKRTADGSEFEKRTADGSEFESPKKKAKVE

SEQ ID NO: 3211 - protein, 2019 aa, synthetic construct
  source 1..2019: note = Description of Artificial Sequence: Synthetic polypeptide
MPAAKRVKLDGGDKKYSIGLDIGTNSVGWAVITDEYKVPSKKFKVLGNTDRHSIKKNLIGALLFDSGETAEATRLKRTARRRYTRRKNRICYLQEIFSNEMAKVDDSFFHRLEESFLVEEDKKHERHPIFGNIVDEVAYHEKYPTIYHLRKKLVDSTDKADLRLIYLALAHMIKFRGHFLIEGDLNPDNSDVDKLFIQLVQTYNQLFEENPINASGVDAKAILSARLSKSRRLENLIAQLPGEKKNGLFGNLIALSLGLTPNFKSNFDLAEDAKLQLSKDTYDDDLDNLLAQIGDQYADLFLAAKNLSDAILLSDILRVNTEITKAPLSASMIKRYDEHHQDLTLLKALVRQQLPEKYKEIFFDQSKNGYAGYIDGGASQEEFYKFIKPILEKMDGTEELLVKLNREDLLRKQRTFDNGSIPHQIHLGELHAILRRQEDFYPFLKDNREKIEKILTFRIPYYVGPLARGNSRFAWMTRKSEETITPWNFEEVVDKGASAQSFIERMTNFDKNLPNEKVLPKHSLLYEYFTVYNELTKVKYVTEGMRKPAFLSGEQKKAIVDLLFKTNRKVTVKQLKEDYFKKIECFDSVEISGVEDRFNASLGTYHDLLKIIKDKDFLDNEENEDILEDIVLTLTLFEDREMIEERLKTYAHLFDDKVMKQLKRRRYTGWGRLSRKLINGIRDKQSGKTILDFLKSDGFANRNFMQLIHDDSLTFKEDIQKAQVSGQGDSLHEHIANLAGSPAIKKGILQTVKVVDELVKVMGRHKPENIVIEMARENQTTQKGQKNSRERMKRIEEGIKELGSQILKEHPVENTQLQNEKLYLYYLQNGRDMYVDQELDINRLSDYDVDHIVPQSFLKDDSIDNKVLTRSDKARGKSDNVPSEEVVKKMKNYWRQLLNAKLITQRKFDNLTKAERGGLSELDKAGFIKRQLVETRQITKHVAQILDSRMNTKYDENDKLIREVKVITLKSKLVSDFRKDFQFYKVREINNYHHAHDAYLNAVVGTALIKKYPKLESEFVYGDYKVYDVRKMIAKSEQEIGKATAKYFFYSNIMNFFKTEITLANGEIRKRPLIETNGETGEIVWDKGRDFATVRKVLSMPQVNIVKKTEVQTGGFSKESILPKRNSDKLIARKKDWDPKKYGGFDSPTVAYSVLVVAKVEKGKSKKLKSVKELLGITIMERSSFEKNPIDFLEAKGYKEVKKDLIIKLPKYSLFELENGRKRMLASAGELQKGNELALPSKYVNFLYLASHYEKLKGSPEDNEQKQLFVEQHKHYLDEIIEQISEFSKRVILADANLDKVLSAYNKHRDKPIREQAENIIHLFTLTNLGAPAAFKYFDTTIDRKRYTSTKEVLDATLIHQSITGLYETRIDLSQLGGDGGGSSGGGGGGRDIMKDIKVRLMTDSPDDSQDLMIGAIESNLFADQISWKSDQPVWLNQWPLKQEKLQALQQLVTEQLQLGHLEESNSPWNTPVFVIKKKSGKWRLLQDLRAVNATMHDMGALQPGLPSPVAVPKGWEIIIIDLQDCFFNIKLHPEDCKRFAFSVPSPNFKRPYQRFQWKVLPQGMKNSPTLCQKFVDKAILTVRDKYQDSYIVHYMDDILLAHPSRSIVDEILTSMIQALNKHGLVVSTEKIQKYDNLKYLGTHIQGDSVSYQKLQIRTDKLRTLNDFQKLLGNINWIRPFLKLTTGELKPLFEILNGDSNPISTRKLTPEACKALQLMNERLSTARVKRLDLSQPWSLCILKTEYTPTACLWQDGVVEWIHLPHISPKVITPYDIFCTQLIIKGRHRSKELFSKDPDYIVVPYTKVQFDLLLQEKEDWPISLLGFLGEVHFHLPKDPLLTFTLQTAIIFPHMTSTTPLEKGIVIFTDGSANGRSVTYIQGREPIIKENTQNTAQQAEIVAVITAFEEVSQPFNLYTDSKYVTGLFPEIETATLSPRTKIYTELKHLQRLIHKRQEKFYIGHIRGHTGLPGPLAQGNAYADSLTRILTAGKRTADGSEFEKRTADGSEFESPKKKAKVE

SEQ ID NO: 3212 - protein, 2020 aa, synthetic construct
  source 1..2020: note = Description of Artificial Sequence: Synthetic polypeptide
MPAAKRVKLDGGDKKYSIGLDIGTNSVGWAVITDEYKVPSKKFKVLGNTDRHSIKKNLIGALLFDSGETAEATRLKRTARRRYTRRKNRICYLQEIFSNEMAKVDDSFFHRLEESFLVEEDKKHERHPIFGNIVDEVAYHEKYPTIYHLRKKLVDSTDKADLRLIYLALAHMIKFRGHFLIEGDLNPDNSDVDKLFIQLVQTYNQLFEENPINASGVDAKAILSARLSKSRRLENLIAQLPGEKKNGLFGNLIALSLGLTPNFKSNFDLAEDAKLQLSKDTYDDDLDNLLAQIGDQYADLFLAAKNLSDAILLSDILRVNTEITKAPLSASMIKRYDEHHQDLTLLKALVRQQLPEKYKEIFFDQSKNGYAGYIDGGASQEEFYKFIKPILEKMDGTEELLVKLNREDLLRKQRTFDNGSIPHQIHLGELHAILRRQEDFYPFLKDNREKIEKILTFRIPYYVGPLARGNSRFAWMTRKSEETITPWNFEEVVDKGASAQSFIERMTNFDKNLPNEKVLPKHSLLYEYFTVYNELTKVKYVTEGMRKPAFLSGEQKKAIVDLLFKTNRKVTVKQLKEDYFKKIECFDSVEISGVEDRFNASLGTYHDLLKIIKDKDFLDNEENEDILEDIVLTLTLFEDREMIEERLKTYAHLFDDKVMKQLKRRRYTGWGRLSRKLINGIRDKQSGKTILDFLKSDGFANRNFMQLIHDDSLTFKEDIQKAQVSGQGDSLHEHIANLAGSPAIKKGILQTVKVVDELVKVMGRHKPENIVIEMARENQTTQKGQKNSRERMKRIEEGIKELGSQILKEHPVENTQLQNEKLYLYYLQNGRDMYVDQELDINRLSDYDVDHIVPQSFLKDDSIDNKVLTRSDKARGKSDNVPSEEVVKKMKNYWRQLLNAKLITQRKFDNLTKAERGGLSELDKAGFIKRQLVETRQITKHVAQILDSRMNTKYDENDKLIREVKVITLKSKLVSDFRKDFQFYKVREINNYHHAHDAYLNAVVGTALIKKYPKLESEFVYGDYKVYDVRKMIAKSEQEIGKATAKYFFYSNIMNFFKTEITLANGEIRKRPLIETNGETGEIVWDKGRDFATVRKVLSMPQVNIVKKTEVQTGGFSKESILPKRNSDKLIARKKDWDPKKYGGFDSPTVAYSVLVVAKVEKGKSKKLKSVKELLGITIMERSSFEKNPIDFLEAKGYKEVKKDLIIKLPKYSLFELENGRKRMLASAGELQKGNELALPSKYVNFLYLASHYEKLKGSPEDNEQKQLFVEQHKHYLDEIIEQISEFSKRVILADANLDKVLSAYNKHRDKPIREQAENIIHLFTLTNLGAPAAFKYFDTTIDRKRYTSTKEVLDATLIHQSITGLYETRIDLSQLGGDGGGGGGGGGGGGRDIMKDIKVRLMTDSPDDSQDLMIGAIESNLFADQISWKSDQPVWLNQWPLKQEKLQALQQLVTEQLQLGHLEESNSPWNTPVFVIKKKSGKWRLLQDLRAVNATMHDMGALQPGLPSPVAVPKGWEIIIIDLQDCFFNIKLHPEDCKRFAFSVPSPNFKRPYQRFQWKVLPQGMKNSPTLCQKFVDKAILTVRDKYQDSYIVHYMDDILLAHPSRSIVDEILTSMIQALNKHGLVVSTEKIQKYDNLKYLGTHIQGDSVSYQKLQIRTDKLRTLNDFQKLLGNINWIRPFLKLTTGELKPLFEILNGDSNPISTRKLTPEACKALQLMNERLSTARVKRLDLSQPWSLCILKTEYTPTACLWQDGVVEWIHLPHISPKVITPYDIFCTQLIIKGRHRSKELFSKDPDYIVVPYTKVQFDLLLQEKEDWPISLLGFLGEVHFHLPKDPLLTFTLQTAIIFPHMTSTTPLEKGIVIFTDGSANGRSVTYIQGREPIIKENTQNTAQQAEIVAVITAFEEVSQPFNLYTDSKYVTGLFPEIETATLSPRTKIYTELKHLQRLIHKRQEKFYIGHIRGHTGLPGPLAQGNAYADSLTRILTAGKRTADGSEFEKRTADGSEFESPKKKAKVE

SEQ ID NO: 3213 - protein, 2024 aa, synthetic construct
  source 1..2024: note = Description of Artificial Sequence: Synthetic polypeptide
MPAAKRVKLDGGDKKYSIGLDIGTNSVGWAVITDEYKVPSKKFKVLGNTDRHSIKKNLIGALLFDSGETAEATRLKRTARRRYTRRKNRICYLQEIFSNEMAKVDDSFFHRLEESFLVEEDKKHERHPIFGNIVDEVAYHEKYPTIYHLRKKLVDSTDKADLRLIYLALAHMIKFRGHFLIEGDLNPDNSDVDKLFIQLVQTYNQLFEENPINASGVDAKAILSARLSKSRRLENLIAQLPGEKKNGLFGNLIALSLGLTPNFKSNFDLAEDAKLQLSKDTYDDDLDNLLAQIGDQYADLFLAAKNLSDAILLSDILRVNTEITKAPLSASMIKRYDEHHQDLTLLKALVRQQLPEKYKEIFFDQSKNGYAGYIDGGASQEEFYKFIKPILEKMDGTEELLVKLNREDLLRKQRTFDNGSIPHQIHLGELHAILRRQEDFYPFLKDNREKIEKILTFRIPYYVGPLARGNSRFAWMTRKSEETITPWNFEEVVDKGASAQSFIERMTNFDKNLPNEKVLPKHSLLYEYFTVYNELTKVKYVTEGMRKPAFLSGEQKKAIVDLLFKTNRKVTVKQLKEDYFKKIECFDSVEISGVEDRFNASLGTYHDLLKIIKDKDFLDNEENEDILEDIVLTLTLFEDREMIEERLKTYAHLFDDKVMKQLKRRRYTGWGRLSRKLINGIRDKQSGKTILDFLKSDGFANRNFMQLIHDDSLTFKEDIQKAQVSGQGDSLHEHIANLAGSPAIKKGILQTVKVVDELVKVMGRHKPENIVIEMARENQTTQKGQKNSRERMKRIEEGIKELGSQILKEHPVENTQLQNEKLYLYYLQNGRDMYVDQELDINRLSDYDVDHIVPQSFLKDDSIDNKVLTRSDKARGKSDNVPSEEVVKKMKNYWRQLLNAKLITQRKFDNLTKAERGGLSELDKAGFIKRQLVETRQITKHVAQILDSRMNTKYDENDKLIREVKVITLKSKLVSDFRKDFQFYKVREINNYHHAHDAYLNAVVGTALIKKYPKLESEFVYGDYKVYDVRKMIAKSEQEIGKATAKYFFYSNIMNFFKTEITLANGEIRKRPLIETNGETGEIVWDKGRDFATVRKVLSMPQVNIVKKTEVQTGGFSKESILPKRNSDKLIARKKDWDPKKYGGFDSPTVAYSVLVVAKVEKGKSKKLKSVKELLGITIMERSSFEKNPIDFLEAKGYKEVKKDLIIKLPKYSLFELENGRKRMLASAGELQKGNELALPSKYVNFLYLASHYEKLKGSPEDNEQKQLFVEQHKHYLDEIIEQISEFSKRVILADANLDKVLSAYNKHRDKPIREQAENIIHLFTLTNLGAPAAFKYFDTTIDRKRYTSTKEVLDATLIHQSITGLYETRIDLSQLGGDGGGGGEAAAKPAPGGGRDIMKDIKVRLMTDSPDDSQDLMIGAIESNLFADQISWKSDQPVWLNQWPLKQEKLQALQQLVTEQLQLGHLEESNSPWNTPVFVIKKKSGKWRLLQDLRAVNATMHDMGALQPGLPSPVAVPKGWEIIIIDLQDCFFNIKLHPEDCKRFAFSVPSPNFKRPYQRFQWKVLPQGMKNSPTLCQKFVDKAILTVRDKYQDSYIVHYMDDILLAHPSRSIVDEILTSMIQALNKHGLVVSTEKIQKYDNLKYLGTHIQGDSVSYQKLQIRTDKLRTLNDFQKLLGNINWIRPFLKLTTGELKPLFEILNGDSNPISTRKLTPEACKALQLMNERLSTARVKRLDLSQPWSLCILKTEYTPTACLWQDGVVEWIHLPHISPKVITPYDIFCTQLIIKGRHRSKELFSKDPDYIVVPYTKVQFDLLLQEKEDWPISLLGFLGEVHFHLPKDPLLTFTLQTAIIFPHMTSTTPLEKGIVIFTDGSANGRSVTYIQGREPIIKENTQNTAQQAEIVAVITAFEEVSQPFNLYTDSKYVTGLFPEIETATLSPRTKIYTELKHLQRLIHKRQEKFYIGHIRGHTGLPGPLAQGNAYADSLTRILTAGKRTADGSEFEKRTADGSEFESPKKKAKVE

SEQ ID NO: 3214 - protein, 2024 aa, synthetic construct
  source 1..2024: note = Description of Artificial Sequence: Synthetic polypeptide
MPAAKRVKLDGGDKKYSIGLDIGTNSVGWAVITDEYKVPSKKFKVLGNTDRHSIKKNLIGALLFDSGETAEATRLKRTARRRYTRRKNRICYLQEIFSNEMAKVDDSFFHRLEESFLVEEDKKHERHPIFGNIVDEVAYHEKYPTIYHLRKKLVDSTDKADLRLIYLALAHMIKFRGHFLIEGDLNPDNSDVDKLFIQLVQTYNQLFEENPINASGVDAKAILSARLSKSRRLENLIAQLPGEKKNGLFGNLIALSLGLTPNFKSNFDLAEDAKLQLSKDTYDDDLDNLLAQIGDQYADLFLAAKNLSDAILLSDILRVNTEITKAPLSASMIKRYDEHHQDLTLLKALVRQQLPEKYKEIFFDQSKNGYAGYIDGGASQEEFYKFIKPILEKMDGTEELLVKLNREDLLRKQRTFDNGSIPHQIHLGELHAILRRQEDFYPFLKDNREKIEKILTFRIPYYVGPLARGNSRFAWMTRKSEETITPWNFEEVVDKGASAQSFIERMTNFDKNLPNEKVLPKHSLLYEYFTVYNELTKVKYVTEGMRKPAFLSGEQKKAIVDLLFKTNRKVTVKQLKEDYFKKIECFDSVEISGVEDRFNASLGTYHDLLKIIKDKDFLDNEENEDILEDIVLTLTLFEDREMIEERLKTYAHLFDDKVMKQLKRRRYTGWGRLSRKLINGIRDKQSGKTILDFLKSDGFANRNFMQLIHDDSLTFKEDIQKAQVSGQGDSLHEHIANLAGSPAIKKGILQTVKVVDELVKVMGRHKPENIVIEMARENQTTQKGQKNSRERMKRIEEGIKELGSQILKEHPVENTQLQNEKLYLYYLQNGRDMYVDQELDINRLSDYDVDHIVPQSFLKDDSIDNKVLTRSDKARGKSDNVPSEEVVKKMKNYWRQLLNAKLITQRKFDNLTKAERGGLSELDKAGFIKRQLVETRQITKHVAQILDSRMNTKYDENDKLIREVKVITLKSKLVSDFRKDFQFYKVREINNYHHAHDAYLNAVVGTALIKKYPKLESEFVYGDYKVYDVRKMIAKSEQEIGKATAKYFFYSNIMNFFKTEITLANGEIRKRPLIETNGETGEIVWDKGRDFATVRKVLSMPQVNIVKKTEVQTGGFSKESILPKRNSDKLIARKKDWDPKKYGGFDSPTVAYSVLVVAKVEKGKSKKLKSVKELLGITIMERSSFEKNPIDFLEAKGYKEVKKDLIIKLPKYSLFELENGRKRMLASAGELQKGNELALPSKYVNFLYLASHYEKLKGSPEDNEQKQLFVEQHKHYLDEIIEQISEFSKRVILADANLDKVLSAYNKHRDKPIREQAENIIHLFTLTNLGAPAAFKYFDTTIDRKRYTSTKEVLDATLIHQSITGLYETRIDLSQLGGDGGGGGEAAAKGGSGGGRDIMKDIKVRLMTDSPDDSQDLMIGAIESNLFADQISWKSDQPVWLNQWPLKQEKLQALQQLVTEQLQLGHLEESNSPWNTPVFVIKKKSGKWRLLQDLRAVNATMHDMGALQPGLPSPVAVPKGWEIIIIDLQDCFFNIKLHPEDCKRFAFSVPSPNFKRPYQRFQWKVLPQGMKNSPTLCQKFVDKAILTVRDKYQDSYIVHYMDDILLAHPSRSIVDEILTSMIQALNKHGLVVSTEKIQKYDNLKYLGTHIQGDSVSYQKLQIRTDKLRTLNDFQKLLGNINWIRPFLKLTTGELKPLFEILNGDSNPISTRKLTPEACKALQLMNERLSTARVKRLDLSQPWSLCILKTEYTPTACLWQDGVVEWIHLPHISPKVITPYDIFCTQLIIKGRHRSKELFSKDPDYIVVPYTKVQFDLLLQEKEDWPISLLGFLGEVHFHLPKDPLLTFTLQTAIIFPHMTSTTPLEKGIVIFTDGSANGRSVTYIQGREPIIKENTQNTAQQAEIVAVITAFEEVSQPFNLYTDSKYVTGLFPEIETATLSPRTKIYTELKHLQRLIHKRQEKFYIGHIRGHTGLPGPLAQGNAYADSLTRILTAGKRTADGSEFEKRTADGSEFESPKKKAKVE

SEQ ID NO: 3215 - protein, 2022 aa, synthetic construct
  source 1..2022: note = Description of Artificial Sequence: Synthetic polypeptide
MPAAKRVKLDGGDKKYSIGLDIGTNSVGWAVITDEYKVPSKKFKVLGNTDRHSIKKNLIGALLFDSGETAEATRLKRTARRRYTRRKNRICYLQEIFSNEMAKVDDSFFHRLEESFLVEEDKKHERHPIFGNIVDEVAYHEKYPTIYHLRKKLVDSTDKADLRLIYLALAHMIKFRGHFLIEGDLNPDNSDVDKLFIQLVQTYNQLFEENPINASGVDAKAILSARLSKSRRLENLIAQLPGEKKNGLFGNLIALSLGLTPNFKSNFDLAEDAKLQLSKDTYDDDLDNLLAQIGDQYADLFLAAKNLSDAILLSDILRVNTEITKAPLSASMIKRYDEHHQDLTLLKALVRQQLPEKYKEIFFDQSKNGYAGYIDGGASQEEFYKFIKPILEKMDGTEELLVKLNREDLLRKQRTFDNGSIPHQIHLGELHAILRRQEDFYPFLKDNREKIEKILTFRIPYYVGPLARGNSRFAWMTRKSEETITPWNFEEVVDKGASAQSFIERMTNFDKNLPNEKVLPKHSLLYEYFTVYNELTKVKYVTEGMRKPAFLSGEQKKAIVDLLFKTNRKVTVKQLKEDYFKKIECFDSVEISGVEDRFNASLGTYHDLLKIIKDKDFLDNEENEDILEDIVLTLTLFEDREMIEERLKTYAHLFDDKVMKQLKRRRYTGWGRLSRKLINGIRDKQSGKTILDFLKSDGFANRNFMQLIHDDSLTFKEDIQKAQVSGQGDSLHEHIANLAGSPAIKKGILQTVKVVDELVKVMGRHKPENIVIEMARENQTTQKGQKNSRERMKRIEEGIKELGSQILKEHPVENTQLQNEKLYLYYLQNGRDMYVDQELDINRLSDYDVDHIVPQSFLKDDSIDNKVLTRSDKARGKSDNVPSEEVVKKMKNYWRQLLNAKLITQRKFDNLTKAERGGLSELDKAGFIKRQLVETRQITKHVAQILDSRMNTKYDENDKLIREVKVITLKSKLVSDFRKDFQFYKVREINNYHHAHDAYLNAVVGTALIKKYPKLESEFVYGDYKVYDVRKMIAKSEQEIGKATAKYFFYSNIMNFFKTEITLANGEIRKRPLIETNGETGEIVWDKGRDFATVRKVLSMPQVNIVKKTEVQTGGFSKESILPKRNSDKLIARKKDWDPKKYGGFDSPTVAYSVLVVAKVEKGKSKKLKSVKELLGITIMERSSFEKNPIDFLEAKGYKEVKKDLIIKLPKYSLFELENGRKRMLASAGELQKGNELALPSKYVNFLYLASHYEKLKGSPEDNEQKQLFVEQHKHYLDEIIEQISEFSKRVILADANLDKVLSAYNKHRDKPIREQAENIIHLFTLTNLGAPAAFKYFDTTIDRKRYTSTKEVLDATLIHQSITGLYETRIDLSQLGGDGGPAPGSSGGSGGGRDIMKDIKVRLMTDSPDDSQDLMIGAIESNLFADQISWKSDQPVWLNQWPLKQEKLQALQQLVTEQLQLGHLEESNSPWNTPVFVIKKKSGKWRLLQDLRAVNATMHDMGALQPGLPSPVAVPKGWEIIIIDLQDCFFNIKLHPEDCKRFAFSVPSPNFKRPYQRFQWKVLPQGMKNSPTLCQKFVDKAILTVRDKYQDSYIVHYMDDILLAHPSRSIVDEILTSMIQALNKHGLVVSTEKIQKYDNLKYLGTHIQGDSVSYQKLQIRTDKLRTLNDFQKLLGNINWIRPFLKLTTGELKPLFEILNGDSNPISTRKLTPEACKALQLMNERLSTARVKRLDLSQPWSLCILKTEYTPTACLWQDGVVEWIHLPHISPKVITPYDIFCTQLIIKGRHRSKELFSKDPDYIVVPYTKVQFDLLLQEKEDWPISLLGFLGEVHFHLPKDPLLTFTLQTAIIFPHMTSTTPLEKGIVIFTDGSANGRSVTYIQGREPIIKENTQNTAQQAEIVAVITAFEEVSQPFNLYTDSKYVTGLFPEIETATLSPRTKIYTELKHLQRLIHKRQEKFYIGHIRGHTGLPGPLAQGNAYADSLTRILTAGKRTADGSEFEKRTADGSEFESPKKKAKVE

SEQ ID NO: 3216 - protein, 2043 aa, synthetic construct
  source 1..2043: note = Description of Artificial Sequence: Synthetic polypeptide
MPAAKRVKLDGGDKKYSIGLDIGTNSVGWAVITDEYKVPSKKFKVLGNTDRHSIKKNLIGALLFDSGETAEATRLKRTARRRYTRRKNRICYLQEIFSNEMAKVDDSFFHRLEESFLVEEDKKHERHPIFGNIVDEVAYHEKYPTIYHLRKKLVDSTDKADLRLIYLALAHMIKFRGHFLIEGDLNPDNSDVDKLFIQLVQTYNQLFEENPINASGVDAKAILSARLSKSRRLENLIAQLPGEKKNGLFGNLIALSLGLTPNFKSNFDLAEDAKLQLSKDTYDDDLDNLLAQIGDQYADLFLAAKNLSDAILLSDILRVNTEITKAPLSASMIKRYDEHHQDLTLLKALVRQQLPEKYKEIFFDQSKNGYAGYIDGGASQEEFYKFIKPILEKMDGTEELLVKLNREDLLRKQRTFDNGSIPHQIHLGELHAILRRQEDFYPFLKDNREKIEKILTFRIPYYVGPLARGNSRFAWMTRKSEETITPWNFEEVVDKGASAQSFIERMTNFDKNLPNEKVLPKHSLLYEYFTVYNELTKVKYVTEGMRKPAFLSGEQKKAIVDLLFKTNRKVTVKQLKEDYFKKIECFDSVEISGVEDRFNASLGTYHDLLKIIKDKDFLDNEENEDILEDIVLTLTLFEDREMIEERLKTYAHLFDDKVMKQLKRRRYTGWGRLSRKLINGIRDKQSGKTILDFLKSDGFANRNFMQLIHDDSLTFKEDIQKAQVSGQGDSLHEHIANLAGSPAIKKGILQTVKVVDELVKVMGRHKPENIVIEMARENQTTQKGQKNSRERMKRIEEGIKELGSQILKEHPVENTQLQNEKLYLYYLQNGRDMYVDQELDINRLSDYDVDHIVPQSFLKDDSIDNKVLTRSDKARGKSDNVPSEEVVKKMKNYWRQLLNAKLITQRKFDNLTKAERGGLSELDKAGFIKRQLVETRQITKHVAQILDSRMNTKYDENDKLIREVKVITLKSKLVSDFRKDFQFYKVREINNYHHAHDAYLNAVVGTALIKKYPKLESEFVYGDYKVYDVRKMIAKSEQEIGKATAKYFFYSNIMNFFKTEITLANGEIRKRPLIETNGETGEIVWDKGRDFATVRKVLSMPQVNIVKKTEVQTGGFSKESILPKRNSDKLIARKKDWDPKKYGGFDSPTVAYSVLVVAKVEKGKSKKLKSVKELLGITIMERSSFEKNPIDFLEAKGYKEVKKDLIIKLPKYSLFELENGRKRMLASAGELQKGNELALPSKYVNFLYLASHYEKLKGSPEDNEQKQLFVEQHKHYLDEIIEQISEFSKRVILADANLDKVLSAYNKHRDKPIREQAENIIHLFTLTNLGAPAAFKYFDTTIDRKRYTSTKEVLDATLIHQSITGLYETRIDLSQLGGDGGGGGGSGGGGSGGGGSGGGGSGGGGSGGGGSGGGRDIMKDIKVRLMTDSPDDSQDLMIGAIESNLFADQISWKSDQPVWLNQWPLKQEKLQALQQLVTEQLQLGHLEESNSPWNTPVFVIKKKSGKWRLLQDLRAVNATMHDMGALQPGLPSPVAVPKGWEIIIIDLQDCFFNIKLHPEDCKRFAFSVPSPNFKRPYQRFQWKVLPQGMKNSPTLCQKFVDKAILTVRDKYQDSYIVHYMDDILLAHPSRSIVDEILTSMIQALNKHGLVVSTEKIQKYDNLKYLGTHIQGDSVSYQKLQIRTDKLRTLNDFQKLLGNINWIRPFLKLTTGELKPLFEILNGDSNPISTRKLTPEACKALQLMNERLSTARVKRLDLSQPWSLCILKTEYTPTACLWQDGVVEWIHLPHISPKVITPYDIFCTQLIIKGRHRSKELFSKDPDYIVVPYTKVQFDLLLQEKEDWPISLLGFLGEVHFHLPKDPLLTFTLQTAIIFPHMTSTTPLEKGIVIFTDGSANGRSVTYIQGREPIIKENTQNTAQQAEIVAVITAFEEVSQPFNLYTDSKYVTGLFPEIETATLSPRTKIYTELKHLQRLIHKRQEKFYIGHIRGHTGLPGPLAQGNAYADSLTRILTAGKRTADGSEFEKRTADGSEFESPKKKAKVE

SEQ ID NO: 3217 - protein, 2021 aa, synthetic construct
  source 1..2021: note = Description of Artificial Sequence: Synthetic polypeptide
MPAAKRVKLDGGDKKYSIGLDIGTNSVGWAVITDEYKVPSKKFKVLGNTDRHSIKKNLIGALLFDSGETAEATRLKRTARRRYTRRKNRICYLQEIFSNEMAKVDDSFFHRLEESFLVEEDKKHERHPIFGNIVDEVAYHEKYPTIYHLRKKLVDSTDKADLRLIYLALAHMIKFRGHFLIEGDLNPDNSDVDKLFIQLVQTYNQLFEENPINASGVDAKAILSARLSKSRRLENLIAQLPGEKKNGLFGNLIALSLGLTPNFKSNFDLAEDAKLQLSKDTYDDDLDNLLAQIGDQYADLFLAAKNLSDAILLSDILRVNTEITKAPLSASMIKRYDEHHQDLTLLKALVRQQLPEKYKEIFFDQSKNGYAGYIDGGASQEEFYKFIKPILEKMDGTEELLVKLNREDLLRKQRTFDNGSIPHQIHLGELHAILRRQEDFYPFLKDNREKIEKILTFRIPYYVGPLARGNSRFAWMTRKSEETITPWNFEEVVDKGASAQSFIERMTNFDKNLPNEKVLPKHSLLYEYFTVYNELTKVKYVTEGMRKPAFLSGEQKKAIVDLLFKTNRKVTVKQLKEDYFKKIECFDSVEISGVEDRFNASLGTYHDLLKIIKDKDFLDNEENEDILEDIVLTLTLFEDREMIEERLKTYAHLFDDKVMKQLKRRRYTGWGRLSRKLINGIRDKQSGKTILDFLKSDGFANRNFMQLIHDDSLTFKEDIQKAQVSGQGDSLHEHIANLAGSPAIKKGILQTVKVVDELVKVMGRHKPENIVIEMARENQTTQKGQKNSRERMKRIEEGIKELGSQILKEHPVENTQLQNEKLYLYYLQNGRDMYVDQELDINRLSDYDVDHIVPQSFLKDDSIDNKVLTRSDKARGKSDNVPSEEVVKKMKNYWRQLLNAKLITQRKFDNLTKAERGGLSELDKAGFIKRQLVETRQITKHVAQILDSRMNTKYDENDKLIREVKVITLKSKLVSDFRKDFQFYKVREINNYHHAHDAYLNAVVGTALIKKYPKLESEFVYGDYKVYDVRKMIAKSEQEIGKATAKYFFYSNIMNFFKTEITLANGEIRKRPLIETNGETGEIVWDKGRDFATVRKVLSMPQVNIVKKTEVQTGGFSKESILPKRNSDKLIARKKDWDPKKYGGFDSPTVAYSVLVVAKVEKGKSKKLKSVKELLGITIMERSSFEKNPIDFLEAKGYKEVKKDLIIKLPKYSLFELENGRKRMLASAGELQKGNELALPSKYVNFLYLASHYEKLKGSPEDNEQKQLFVEQHKHYLDEIIEQISEFSKRVILADANLDKVLSAYNKHRDKPIREQAENIIHLFTLTNLGAPAAFKYFDTTIDRKRYTSTKEVLDATLIHQSITGLYETRIDLSQLGGDGGPAPEAAAKGGGRDIMKDIKVRLMTDSPDDSQDLMIGAIESNLFADQISWKSDQPVWLNQWPLKQEKLQALQQLVTEQLQLGHLEESNSPWNTPVFVIKKKSGKWRLLQDLRAVNATMHDMGALQPGLPSPVAVPKGWEIIIIDLQDCFFNIKLHPEDCKRFAFSVPSPNFKRPYQRFQWKVLPQGMKNSPTLCQKFVDKAILTVRDKYQDSYIVHYMDDILLAHPSRSIVDEILTSMIQALNKHGLVVSTEKIQKYDNLKYLGTHIQGDSVSYQKLQIRTDKLRTLNDFQKLLGNINWIRPFLKLTTGELKPLFEILNGDSNPISTRKLTPEACKALQLMNERLSTARVKRLDLSQPWSLCILKTEYTPTACLWQDGVVEWIHLPHISPKVITPYDIFCTQLIIKGRHRSKELFSKDPDYIVVPYTKVQFDLLLQEKEDWPISLLGFLGEVHFHLPKDPLLTFTLQTAIIFPHMTSTTPLEKGIVIFTDGSANGRSVTYIQGREPIIKENTQNTAQQAEIVAVITAFEEVSQPFNLYTDSKYVTGLFPEIETATLSPRTKIYTELKHLQRLIHKRQEKFYIGHIRGHTGLPGPLAQGNAYADSLTRILTAGKRTADGSEFEKRTADGSEFESPKKKAKVE

SEQ ID NO: 3218 - protein, 2018 aa, synthetic construct
  source 1..2018: note = Description of Artificial Sequence: Synthetic polypeptide
MPAAKRVKLDGGDKKYSIGLDIGTNSVGWAVITDEYKVPSKKFKVLGNTDRHSIKKNLIGALLFDSGETAEATRLKRTARRRYTRRKNRICYLQEIFSNEMAKVDDSFFHRLEESFLVEEDKKHERHPIFGNIVDEVAYHEKYPTIYHLRKKLVDSTDKADLRLIYLALAHMIKFRGHFLIEGDLNPDNSDVDKLFIQLVQTYNQLFEENPINASGVDAKAILSARLSKSRRLENLIAQLPGEKKNGLFGNLIALSLGLTPNFKSNFDLAEDAKLQLSKDTYDDDLDNLLAQIGDQYADLFLAAKNLSDAILLSDILRVNTEITKAPLSASMIKRYDEHHQDLTLLKALVRQQLPEKYKEIFFDQSKNGYAGYIDGGASQEEFYKFIKPILEKMDGTEELLVKLNREDLLRKQRTFDNGSIPHQIHLGELHAILRRQEDFYPFLKDNREKIEKILTFRIPYYVGPLARGNSRFAWMTRKSEETITPWNFEEVVDKGASAQSFIERMTNFDKNLPNEKVLPKHSLLYEYFTVYNELTKVKYVTEGMRKPAFLSGEQKKAIVDLLFKTNRKVTVKQLKEDYFKKIECFDSVEISGVEDRFNASLGTYHDLLKIIKDKDFLDNEENEDILEDIVLTLTLFEDREMIEERLKTYAHLFDDKVMKQLKRRRYTGWGRLSRKLINGIRDKQSGKTILDFLKSDGFANRNFMQLIHDDSLTFKEDIQKAQVSGQGDSLHEHIANLAGSPAIKKGILQTVKVVDELVKVMGRHKPENIVIEMARENQTTQKGQKNSRERMKRIEEGIKELGSQILKEHPVENTQLQNEKLYLYYLQNGRDMYVDQELDINRLSDYDVDHIVPQSFLKDDSIDNKVLTRSDKARGKSDNVPSEEVVKKMKNYWRQLLNAKLITQRKFDNLTKAERGGLSELDKAGFIKRQLVETRQITKHVAQILDSRMNTKYDENDKLIREVKVITLKSKLVSDFRKDFQFYKVREINNYHHAHDAYLNAVVGTALIKKYPKLESEFVYGDYKVYDVRKMIAKSEQEIGKATAKYFFYSNIMNFFKTEITLANGEIRKRPLIETNGETGEIVWDKGRDFATVRKVLSMPQVNIVKKTEVQTGGFSKESILPKRNSDKLIARKKDWDPKKYGGFDSPTVAYSVLVVAKVEKGKSKKLKSVKELLGITIMERSSFEKNPIDFLEAKGYKEVKKDLIIKLPKYSLFELENGRKRMLASAGELQKGNELALPSKYVNFLYLASHYEKLKGSPEDNEQKQLFVEQHKHYLDEIIEQISEFSKRVILADANLDKVLSAYNKHRDKPIREQAENIIHLFTLTNLGAPAAFKYFDTTIDRKRYTSTKEVLDATLIHQSITGLYETRIDLSQLGGDGGPAPAPGGGRDIMKDIKVRLMTDSPDDSQDLMIGAIESNLFADQISWKSDQPVWLNQWPLKQEKLQALQQLVTEQLQLGHLEESNSPWNTPVFVIKKKSGKWRLLQDLRAVNATMHDMGALQPGLPSPVAVPKGWEIIIIDLQDCFFNIKLHPEDCKRFAFSVPSPNFKRPYQRFQWKVLPQGMKNSPTLCQKFVDKAILTVRDKYQDSYIVHYMDDILLAHPSRSIVDEILTSMIQALNKHGLVVSTEKIQKYDNLKYLGTHIQGDSVSYQKLQIRTDKLRTLNDFQKLLGNINWIRPFLKLTTGELKPLFEILNGDSNPISTRKLTPEACKALQLMNERLSTARVKRLDLSQPWSLCILKTEYTPTACLWQDGVVEWIHLPHISPKVITPYDIFCTQLIIKGRHRSKELFSKDPDYIVVPYTKVQFDLLLQEKEDWPISLLGFLGEVHFHLPKDPLLTFTLQTAIIFPHMTSTTPLEKGIVIFTDGSANGRSVTYIQGREPIIKENTQNTAQQAEIVAVITAFEEVSQPFNLYTDSKYVTGLFPEIETATLSPRTKIYTELKHLQRLIHKRQEKFYIGHIRGHTGLPGPLAQGNAYADSLTRILTAGKRTADGSEFEKRTADGSEFESPKKKAKVE

SEQ ID NO: 3219 - protein, 2025 aa, synthetic construct
  source 1..2025: note = Description of Artificial Sequence: Synthetic polypeptide
MPAAKRVKLDGGDKKYSIGLDIGTNSVGWAVITDEYKVPSKKFKVLGNTDRHSIKKNLIGALLFDSGETAEATRLKRTARRRYTRRKNRICYLQEIFSNEMAKVDDSFFHRLEESFLVEEDKKHERHPIFGNIVDEVAYHEKYPTIYHLRKKLVDSTDKADLRLIYLALAHMIKFRGHFLIEGDLNPDNSDVDKLFIQLVQTYNQLFEENPINASGVDAKAILSARLSKSRRLENLIAQLPGEKKNGLFGNLIALSLGLTPNFKSNFDLAEDAKLQLSKDTYDDDLDNLLAQIGDQYADLFLAAKNLSDAILLSDILRVNTEITKAPLSASMIKRYDEHHQDLTLLKALVRQQLPEKYKEIFFDQSKNGYAGYIDGGASQEEFYKFIKPILEKMDGTEELLVKLNREDLLRKQRTFDNGSIPHQIHLGELHAILRRQEDFYPFLKDNREKIEKILTFRIPYYVGPLARGNSRFAWMTRKSEETITPWNFEEVVDKGASAQSFIERMTNFDKNLPNEKVLPKHSLLYEYFTVYNELTKVKYVTEGMRKPAFLSGEQKKAIVDLLFKTNRKVTVKQLKEDYFKKIECFDSVEISGVEDRFNASLGTYHDLLKIIKDKDFLDNEENEDILEDIVLTLTLFEDREMIEERLKTYAHLFDDKVMKQLKRRRYTGWGRLSRKLINGIRDKQSGKTILDFLKSDGFANRNFMQLIHDDSLTFKEDIQKAQVSGQGDSLHEHIANLAGSPAIKKGILQTVKVVDELVKVMGRHKPENIVIEMARENQTTQKGQKNSRERMKRIEEGIKELGSQILKEHPVENTQLQNEKLYLYYLQNGRDMYVDQELDINRLSDYDVDHIVPQSFLKDDSIDNKVLTRSDKARGKSDNVPSEEVVKKMKNYWRQLLNAKLITQRKFDNLTKAERGGLSELDKAGFIKRQLVETRQITKHVAQILDSRMNTKYDENDKLIREVKVITLKSKLVSDFRKDFQFYKVREINNYHHAHDAYLNAVVGTALIKKYPKLESEFVYGDYKVYDVRKMIAKSEQEIGKATAKYFFYSNIMNFFKTEITLANGEIRKRPLIETNGETGEIVWDKGRDFATVRKVLSMPQVNIVKKTEVQTGGFSKESILPKRNSDKLIARKKDWDPKKYGGFDSPTVAYSVLVVAKVEKGKSKKLKSVKELLGITIMERSSFEKNPIDFLEAKGYKEVKKDLIIKLPKYSLFELENGRKRMLASAGELQKGNELALPSKYVNFLYLASHYEKLKGSPEDNEQKQLFVEQHKHYLDEIIEQISEFSKRVILADANLDKVLSAYNKHRDKPIREQAENIIHLFTLTNLGAPAAFKYFDTTIDRKRYTSTKEVLDATLIHQSITGLYETRIDLSQLGGDGGGSAGSAAGSGEFGGGRDIMKDIKVRLMTDSPDDSQDLMIGAIESNLFADQISWKSDQPVWLNQWPLKQEKLQALQQLVTEQLQLGHLEESNSPWNTPVFVIKKKSGKWRLLQDLRAVNATMHDMGALQPGLPSPVAVPKGWEIIIIDLQDCFFNIKLHPEDCKRFAFSVPSPNFKRPYQRFQWKVLPQGMKNSPTLCQKFVDKAILTVRDKYQDSYIVHYMDDILLAHPSRSIVDEILTSMIQALNKHGLVVSTEKIQKYDNLKYLGTHIQGDSVSYQKLQIRTDKLRTLNDFQKLLGNINWIRPFLKLTTGELKPLFEILNGDSNPISTRKLTPEACKALQLMNERLSTARVKRLDLSQPWSLCILKTEYTPTACLWQDGVVEWIHLPHISPKVITPYDIFCTQLIIKGRHRSKELFSKDPDYIVVPYTKVQFDLLLQEKEDWPISLLGFLGEVHFHLPKDPLLTFTLQTAIIFPHMTSTTPLEKGIVIFTDGSANGRSVTYIQGREPIIKENTQNTAQQAEIVAVITAFEEVSQPFNLYTDSKYVTGLFPEIETATLSPRTKIYTELKHLQRLIHKRQEKFYIGHIRGHTGLPGPLAQGNAYADSLTRILTAGKRTADGSEFEKRTADGSEFESPKKKAKVE

SEQ ID NO: 3220 - protein, 2022 aa, synthetic construct
  source 1..2022: note = Description of Artificial Sequence: Synthetic polypeptide
MPAAKRVKLDGGDKKYSIGLDIGTNSVGWAVITDEYKVPSKKFKVLGNTDRHSIKKNLIGALLFDSGETAEATRLKRTARRRYTRRKNRICYLQEIFSNEMAKVDDSFFHRLEESFLVEEDKKHERHPIFGNIVDEVAYHEKYPTIYHLRKKLVDSTDKADLRLIYLALAHMIKFRGHFLIEGDLNPDNSDVDKLFIQLVQTYNQLFEENPINASGVDAKAILSARLSKSRRLENLIAQLPGEKKNGLFGNLIALSLGLTPNFKSNFDLAEDAKLQLSKDTYDDDLDNLLAQIGDQYADLFLAAKNLSDAILLSDILRVNTEITKAPLSASMIKRYDEHHQDLTLLKALVRQQLPEKYKEIFFDQSKNGYAGYIDGGASQEEFYKFIKPILEKMDGTEELLVKLNREDLLRKQRTFDNGSIPHQIHLGELHAILRRQEDFYPFLKDNREKIEKILTFRIPYYVGPLARGNSRFAWMTRKSEETITPWNFEEVVDKGASAQSFIERMTNFDKNLPNEKVLPKHSLLYEYFTVYNELTKVKYVTEGMRKPAFLSGEQKKAIVDLLFKTNRKVTVKQLKEDYFKKIECFDSVEISGVEDRFNASLGTYHDLLKIIKDKDFLDNEENEDILEDIVLTLTLFEDREMIEERLKTYAHLFDDKVMKQLKRRRYTGWGRLSRKLINGIRDKQSGKTILDFLKSDGFANRNFMQLIHDDSLTFKEDIQKAQVSGQGDSLHEHIANLAGSPAIKKGILQTVKVVDELVKVMGRHKPENIVIEMARENQTTQKGQKNSRERMKRIEEGIKELGSQILKEHPVENTQLQNEKLYLYYLQNGRDMYVDQELDINRLSDYDVDHIVPQSFLKDDSIDNKVLTRSDKARGKSDNVPSEEVVKKMKNYWRQLLNAKLITQRKFDNLTKAERGGLSELDKAGFIKRQLVETRQITKHVAQILDSRMNTKYDENDKLIREVKVITLKSKLVSDFRKDFQFYKVREINNYHHAHDAYLNAVVGTALIKKYPKLESEFVYGDYKVYDVRKMIAKSEQEIGKATAKYFFYSNIMNFFKTEITLANGEIRKRPLIETNGETGEIVWDKGRDFATVRKVLSMPQVNIVKKTEVQTGGFSKESILPKRNSDKLIARKKDWDPKKYGGFDSPTVAYSVLVVAKVEKGKSKKLKSVKELLGITIMERSSFEKNPIDFLEAKGYKEVKKDLIIKLPKYSLFELENGRKRMLASAGELQKGNELALPSKYVNFLYLASHYEKLKGSPEDNEQKQLFVEQHKHYLDEIIEQISEFSKRVILADANLDKVLSAYNKHRDKPIREQAENIIHLFTLTNLGAPAAFKYFDTTIDRKRYTSTKEVLDATLIHQSITGLYETRIDLSQLGGDGGPAPGGGGGSGGGRDIMKDIKVRLMTDSPDDSQDLMIGAIESNLFADQISWKSDQPVWLNQWPLKQEKLQALQQLVTEQLQLGHLEESNSPWNTPVFVIKKKSGKWRLLQDLRAVNATMHDMGALQPGLPSPVAVPKGWEIIIIDLQDCFFNIKLHPEDCKRFAFSVPSPNFKRPYQRFQWKVLPQGMKNSPTLCQKFVDKAILTVRDKYQDSYIVHYMDDILLAHPSRSIVDEILTSMIQALNKHGLVVSTEKIQKYDNLKYLGTHIQGDSVSYQKLQIRTDKLRTLNDFQKLLGNINWIRPFLKLTTGELKPLFEILNGDSNPISTRKLTPEACKALQLMNERLSTARVKRLDLSQPWSLCILKTEYTPTACLWQDGVVEWIHLPHISPKVITPYDIFCTQLIIKGRHRSKELFSKDPDYIVVPYTKVQFDLLLQEKEDWPISLLGFLGEVHFHLPKDPLLTFTLQTAIIFPHMTSTTPLEKGIVIFTDGSANGRSVTYIQGREPIIKENTQNTAQQAEIVAVITAFEEVSQPFNLYTDSKYVTGLFPEIETATLSPRTKIYTELKHLQRLIHKRQEKFYIGHIRGHTGLPGPLAQGNAYADSLTRILTAGKRTADGSEFEKRTADGSEFESPKKKAKVE

SEQ ID NO: 3221 - protein, 2022 aa, synthetic construct
  source 1..2022: note = Description of Artificial Sequence: Synthetic polypeptide
MPAAKRVKLDGGDKKYSIGLDIGTNSVGWAVITDEYKVPSKKFKVLGNTDRHSIKKNLIGALLFDSGETAEATRLKRTARRRYTRRKNRICYLQEIFSNEMAKVDDSFFHRLEESFLVEEDKKHERHPIFGNIVDEVAYHEKYPTIYHLRKKLVDSTDKADLRLIYLALAHMIKFRGHFLIEGDLNPDNSDVDKLFIQLVQTYNQLFEENPINASGVDAKAILSARLSKSRRLENLIAQLPGEKKNGLFGNLIALSLGLTPNFKSNFDLAEDAKLQLSKDTYDDDLDNLLAQIGDQYADLFLAAKNLSDAILLSDILRVNTEITKAPLSASMIKRYDEHHQDLTLLKALVRQQLPEKYKEIFFDQSKNGYAGYIDGGASQEEFYKFIKPILEKMDGTEELLVKLNREDLLRKQRTFDNGSIPHQIHLGELHAILRRQEDFYPFLKDNREKIEKILTFRIPYYVGPLARGNSRFAWMTRKSEETITPWNFEEVVDKGASAQSFIERMTNFDKNLPNEKVLPKHSLLYEYFTVYNELTKVKYVTEGMRKPAFLSGEQKKAIVDLLFKTNRKVTVKQLKEDYFKKIECFDSVEISGVEDRFNASLGTYHDLLKIIKDKDFLDNEENEDILEDIVLTLTLFEDREMIEERLKTYAHLFDDKVMKQLKRRRYTGWGRLSRKLINGIRDKQSGKTILDFLKSDGFANRNFMQLIHDDSLTFKEDIQKAQVSGQGDSLHEHIANLAGSPAIKKGILQTVKVVDELVKVMGRHKPENIVIEMARENQTTQKGQKNSRERMKRIEEGIKELGSQILKEHPVENTQLQNEKLYLYYLQNGRDMYVDQELDINRLSDYDVDHIVPQSFLKDDSIDNKVLTRSDKARGKSDNVPSEEVVKKMKNYWRQLLNAKLITQRKFDNLTKAERGGLSELDKAGFIKRQLVETRQITKHVAQILDSRMNTKYDENDKLIREVKVITLKSKLVSDFRKDFQFYKVREINNYHHAHDAYLNAVVGTALIKKYPKLESEFVYGDYKVYDVRKMIAKSEQEIGKATAKYFFYSNIMNFFKTEITLANGEIRKRPLIETNGETGEIVWDKGRDFATVRKVLSMPQVNIVKKTEVQTGGFSKESILPKRNSDKLIARKKDWDPKKYGGFDSPTVAYSVLVVAKVEKGKSKKLKSVKELLGITIMERSSFEKNPIDFLEAKGYKEVKKDLIIKLPKYSLFELENGRKRMLASAGELQKGNELALPSKYVNFLYLASHYEKLKGSPEDNEQKQLFVEQHKHYLDEIIEQISEFSKRVILADANLDKVLSAYNKHRDKPIREQAENIIHLFTLTNLGAPAAFKYFDTTIDRKRYTSTKEVLDATLIHQSITGLYETRIDLSQLGGDGGPAPAPAPAPGGGRDIMKDIKVRLMTDSPDDSQDLMIGAIESNLFADQISWKSDQPVWLNQWPLKQEKLQALQQLVTEQLQLGHLEESNSPWNTPVFVIKKKSGKWRLLQDLRAVNATMHDMGALQPGLPSPVAVPKGWEIIIIDLQDCFFNIKLHPEDCKRFAFSVPSPNFKRPYQRFQWKVLPQGMKNSPTLCQKFVDKAILTVRDKYQDSYIVHYMDDILLAHPSRSIVDEILTSMIQALNKHGLVVSTEKIQKYDNLKYLGTHIQGDSVSYQKLQIRTDKLRTLNDFQKLLGNINWIRPFLKLTTGELKPLFEILNGDSNPISTRKLTPEACKALQLMNERLSTARVKRLDLSQPWSLCILKTEYTPTACLWQDGVVEWIHLPHISPKVITPYDIFCTQLIIKGRHRSKELFSKDPDYIVVPYTKVQFDLLLQEKEDWPISLLGFLGEVHFHLPKDPLLTFTLQTAIIFPHMTSTTPLEKGIVIFTDGSANGRSVTYIQGREPIIKENTQNTAQQAEIVAVITAFEEVSQPFNLYTDSKYVTGLFPEIETATLSPRTKIYTELKHLQRLIHKRQEKFYIGHIRGHTGLPGPLAQGNAYADSLTRILTAGKRTADGSEFEKRTADGSEFESPKKKAKVE

SEQ ID NO: 3222 - protein, 2024 aa, synthetic construct
  source 1..2024: note = Description of Artificial Sequence: Synthetic polypeptide
MPAAKRVKLDGGDKKYSIGLDIGTNSVGWAVITDEYKVPSKKFKVLGNTDRHSIKKNLIGALLFDSGETAEATRLKRTARRRYTRRKNRICYLQEIFSNEMAKVDDSFFHRLEESFLVEEDKKHERHPIFGNIVDEVAYHEKYPTIYHLRKKLVDSTDKADLRLIYLALAHMIKFRGHFLIEGDLNPDNSDVDKLFIQLVQTYNQLFEENPINASGVDAKAILSARLSKSRRLENLIAQLPGEKKNGLFGNLIALSLGLTPNFKSNFDLAEDAKLQLSKDTYDDDLDNLLAQIGDQYADLFLAAKNLSDAILLSDILRVNTEITKAPLSASMIKRYDEHHQDLTLLKALVRQQLPEKYKEIFFDQSKNGYAGYIDGGASQEEFYKFIKPILEKMDGTEELLVKLNREDLLRKQRTFDNGSIPHQIHLGELHAILRRQEDFYPFLKDNREKIEKILTFRIPYYVGPLARGNSRFAWMTRKSEETITPWNFEEVVDKGASAQSFIERMTNFDKNLPNEKVLPKHSLLYEYFTVYNELTKVKYVTEGMRKPAFLSGEQKKAIVDLLFKTNRKVTVKQLKEDYFKKIECFDSVEISGVEDRFNASLGTYHDLLKIIKDKDFLDNEENEDILEDIVLTLTLFEDREMIEERLKTYAHLFDDKVMKQLKRRRYTGWGRLSRKLINGIRDKQSGKTILDFLKSDGFANRNFMQLIHDDSLTFKEDIQKAQVSGQGDSLHEHIANLAGSPAIKKGILQTVKVVDELVKVMGRHKPENIVIEMARENQTTQKGQKNSRERMKRIEEGIKELGSQILKEHPVENTQLQNEKLYLYYLQNGRDMYVDQELDINRLSDYDVDHIVPQSFLKDDSIDNKVLTRSDKARGKSDNVPSEEVVKKMKNYWRQLLNAKLITQRKFDNLTKAERGGLSELDKAGFIKRQLVETRQITKHVAQILDSRMNTKYDENDKLIREVKVITLKSKLVSDFRKDFQFYKVREINNYHHAHDAYLNAVVGTALIKKYPKLESEFVYGDYKVYDVRKMIAKSEQEIGKATAKYFFYSNIMNFFKTEITLANGEIRKRPLIETNGETGEIVWDKGRDFATVRKVLSMPQVNIVKKTEVQTGGFSKESILPKRNSDKLIARKKDWDPKKYGGFDSPTVAYSVLVVAKVEKGKSKKLKSVKELLGITIMERSSFEKNPIDFLEAKGYKEVKKDLIIKLPKYSLFELENGRKRMLASAGELQKGNELALPSKYVNFLYLASHYEKLKGSPEDNEQKQLFVEQHKHYLDEIIEQISEFSKRVILADANLDKVLSAYNKHRDKPIREQAENIIHLFTLTNLGAPAAFKYFDTTIDRKRYTSTKEVLDATLIHQSITGLYETRIDLSQLGGDGGPAPEAAAKGGSGGGRDIMKDIKVRLMTDSPDDSQDLMIGAIESNLFADQISWKSDQPVWLNQWPLKQEKLQALQQLVTEQLQLGHLEESNSPWNTPVFVIKKKSGKWRLLQDLRAVNATMHDMGALQPGLPSPVAVPKGWEIIIIDLQDCFFNIKLHPEDCKRFAFSVPSPNFKRPYQRFQWKVLPQGMKNSPTLCQKFVDKAILTVRDKYQDSYIVHYMDDILLAHPSRSIVDEILTSMIQALNKHGLVVSTEKIQKYDNLKYLGTHIQGDSVSYQKLQIRTDKLRTLNDFQKLLGNINWIRPFLKLTTGELKPLFEILNGDSNPISTRKLTPEACKALQLMNERLSTARVKRLDLSQPWSLCILKTEYTPTACLWQDGVVEWIHLPHISPKVITPYDIFCTQLIIKGRHRSKELFSKDPDYIVVPYTKVQFDLLLQEKEDWPISLLGFLGEVHFHLPKDPLLTFTLQTAIIFPHMTSTTPLEKGIVIFTDGSANGRSVTYIQGREPIIKENTQNTAQQAEIVAVITAFEEVSQPFNLYTDSKYVTGLFPEIETATLSPRTKIYTELKHLQRLIHKRQEKFYIGHIRGHTGLPGPLAQGNAYADSLTRILTAGKRTADGSEFEKRTADGSEFESPKKKAKVE

SEQ ID NO: 3223 - protein, 2022 aa, synthetic construct
  source 1..2022: note = Description of Artificial Sequence: Synthetic polypeptide
MPAAKRVKLDGGDKKYSIGLDIGTNSVGWAVITDEYKVPSKKFKVLGNTDRHSIKKNLIGALLFDSGETAEATRLKRTARRRYTRRKNRICYLQEIFSNEMAKVDDSFFHRLEESFLVEEDKKHERHPIFGNIVDEVAYHEKYPTIYHLRKKLVDSTDKADLRLIYLALAHMIKFRGHFLIEGDLNPDNSDVDKLFIQLVQTYNQLFEENPINASGVDAKAILSARLSKSRRLENLIAQLPGEKKNGLFGNLIALSLGLTPNFKSNFDLAEDAKLQLSKDTYDDDLDNLLAQIGDQYADLFLAAKNLSDAILLSDILRVNTEITKAPLSASMIKRYDEHHQDLTLLKALVRQQLPEKYKEIFFDQSKNGYAGYIDGGASQEEFYKFIKPILEKMDGTEELLVKLNREDLLRKQRTFDNGSIPHQIHLGELHAILRRQEDFYPFLKDNREKIEKILTFRIPYYVGPLARGNSRFAWMTRKSEETITPWNFEEVVDKGASAQSFIERMTNFDKNLPNEKVLPKHSLLYEYFTVYNELTKVKYVTEGMRKPAFLSGEQKKAIVDLLFKTNRKVTVKQLKEDYFKKIECFDSVEISGVEDRFNASLGTYHDLLKIIKDKDFLDNEENEDILEDIVLTLTLFEDREMIEERLKTYAHLFDDKVMKQLKRRRYTGWGRLSRKLINGIRDKQSGKTILDFLKSDGFANRNFMQLIHDDSLTFKEDIQKAQVSGQGDSLHEHIANLAGSPAIKKGILQTVKVVDELVKVMGRHKPENIVIEMARENQTTQKGQKNSRERMKRIEEGIKELGSQILKEHPVENTQLQNEKLYLYYLQNGRDMYVDQELDINRLSDYDVDHIVPQSFLKDDSIDNKVLTRSDKARGKSDNVPSEEVVKKMKNYWRQLLNAKLITQRKFDNLTKAERGGLSELDKAGFIKRQLVETRQITKHVAQILDSRMNTKYDENDKLIREVKVITLKSKLVSDFRKDFQFYKVREINNYHHAHDAYLNAVVGTALIKKYPKLESEFVYGDYKVYDVRKMIAKSEQEIGKATAKYFFYSNIMNFFKTEITLANGEIRKRPLIETNGETGEIVWDKGRDFATVRKVLSMPQVNIVKKTEVQTGGFSKESILPKRNSDKLIARKKDWDPKKYGGFDSPTVAYSVLVVAKVEKGKSKKLKSVKELLGITIMERSSFEKNPIDFLEAKGYKEVKKDLIIKLPKYSLFELENGRKRMLASAGELQKGNELALPSKYVNFLYLASHYEKLKGSPEDNEQKQLFVEQHKHYLDEIIEQISEFSKRVILADANLDKVLSAYNKHRDKPIREQAENIIHLFTLTNLGAPAAFKYFDTTIDRKRYTSTKEVLDATLIHQSITGLYETRIDLSQLGGDGGGGGPAPGSSGGGRDIMKDIKVRLMTDSPDDSQDLMIGAIESNLFADQISWKSDQPVWLNQWPLKQEKLQALQQLVTEQLQLGHLEESNSPWNTPVFVIKKKSGKWRLLQDLRAVNATMHDMGALQPGLPSPVAVPKGWEIIIIDLQDCFFNIKLHPEDCKRFAFSVPSPNFKRPYQRFQWKVLPQGMKNSPTLCQKFVDKAILTVRDKYQDSYIVHYMDDILLAHPSRSIVDEILTSMIQALNKHGLVVSTEKIQKYDNLKYLGTHIQGDSVSYQKLQIRTDKLRTLNDFQKLLGNINWIRPFLKLTTGELKPLFEILNGDSNPISTRKLTPEACKALQLMNERLSTARVKRLDLSQPWSLCILKTEYTPTACLWQDGVVEWIHLPHISPKVITPYDIFCTQLIIKGRHRSKELFSKDPDYIVVPYTKVQFDLLLQEKEDWPISLLGFLGEVHFHLPKDPLLTFTLQTAIIFPHMTSTTPLEKGIVIFTDGSANGRSVTYIQGREPIIKENTQNTAQQAEIVAVITAFEEVSQPFNLYTDSKYVTGLFPEIETATLSPRTKIYTELKHLQRLIHKRQEKFYIGHIRGHTGLPGPLAQGNAYADSLTRILTAGKRTADGSEFEKRTADGSEFESPKKKAKVE

SEQ ID NO: 3224 - protein, 2022 aa, synthetic construct
  source 1..2022: note = Description of Artificial Sequence: Synthetic polypeptide
MPAAKRVKLDGGDKKYSIGLDIGTNSVGWAVITDEYKVPSKKFKVLGNTDRHSIKKNLIGALLFDSGETAEATRLKRTARRRYTRRKNRICYLQEIFSNEMAKVDDSFFHRLEESFLVEEDKKHERHPIFGNIVDEVAYHEKYPTIYHLRKKLVDSTDKADLRLIYLALAHMIKFRGHFLIEGDLNPDNSDVDKLFIQLVQTYNQLFEENPINASGVDAKAILSARLSKSRRLENLIAQLPGEKKNGLFGNLIALSLGLTPNFKSNFDLAEDAKLQLSKDTYDDDLDNLLAQIGDQYADLFLAAKNLSDAILLSDILRVNTEITKAPLSASMIKRYDEHHQDLTLLKALVRQQLPEKYKEIFFDQSKNGYAGYIDGGASQEEFYKFIKPILEKMDGTEELLVKLNREDLLRKQRTFDNGSIPHQIHLGELHAILRRQEDFYPFLKDNREKIEKILTFRIPYYVGPLARGNSRFAWMTRKSEETITPWNFEEVVDKGASAQSFIERMTNFDKNLPNEKVLPKHSLLYEYFTVYNELTKVKYVTEGMRKPAFLSGEQKKAIVDLLFKTNRKVTVKQLKEDYFKKIECFDSVEISGVEDRFNASLGTYHDLLKIIKDKDFLDNEENEDILEDIVLTLTLFEDREMIEERLKTYAHLFDDKVMKQLKRRRYTGWGRLSRKLINGIRDKQSGKTILDFLKSDGFANRNFMQLIHDDSLTFKEDIQKAQVSGQGDSLHEHIANLAGSPAIKKGILQTVKVVDELVKVMGRHKPENIVIEMARENQTTQKGQKNSRERMKRIEEGIKELGSQILKEHPVENTQLQNEKLYLYYLQNGRDMYVDQELDINRLSDYDVDHIVPQSFLKDDSIDNKVLTRSDKARGKSDNVPSEEVVKKMKNYWRQLLNAKLITQRKFDNLTKAERGGLSELDKAGFIKRQLVETRQITKHVAQILDSRMNTKYDENDKLIREVKVITLKSKLVSDFRKDFQFYKVREINNYHHAHDAYLNAVVGTALIKKYPKLESEFVYGDYKVYDVRKMIAKSEQEIGKATAKYFFYSNIMNFFKTEITLANGEIRKRPLIETNGETGEIVWDKGRDFATVRKVLSMPQVNIVKKTEVQTGGFSKESILPKRNSDKLIARKKDWDPKKYGGFDSPTVAYSVLVVAKVEKGKSKKLKSVKELLGITIMERSSFEKNPIDFLEAKGYKEVKKDLIIKLPKYSLFELENGRKRMLASAGELQKGNELALPSKYVNFLYLASHYEKLKGSPEDNEQKQLFVEQHKHYLDEIIEQISEFSKRVILADANLDKVLSAYNKHRDKPIREQAENIIHLFTLTNLGAPAAFKYFDTTIDRKRYTSTKEVLDATLIHQSITGLYETRIDLSQLGGDGGGGSPAPGGGGGGRDIMKDIKVRLMTDSPDDSQDLMIGAIESNLFADQISWKSDQPVWLNQWPLKQEKLQALQQLVTEQLQLGHLEESNSPWNTPVFVIKKKSGKWRLLQDLRAVNATMHDMGALQPGLPSPVAVPKGWEIIIIDLQDCFFNIKLHPEDCKRFAFSVPSPNFKRPYQRFQWKVLPQGMKNSPTLCQKFVDKAILTVRDKYQDSYIVHYMDDILLAHPSRSIVDEILTSMIQALNKHGLVVSTEKIQKYDNLKYLGTHIQGDSVSYQKLQIRTDKLRTLNDFQKLLGNINWIRPFLKLTTGELKPLFEILNGDSNPISTRKLTPEACKALQLMNERLSTARVKRLDLSQPWSLCILKTEYTPTACLWQDGVVEWIHLPHISPKVITPYDIFCTQLIIKGRHRSKELFSKDPDYIVVPYTKVQFDLLLQEKEDWPISLLGFLGEVHFHLPKDPLLTFTLQTAIIFPHMTSTTPLEKGIVIFTDGSANGRSVTYIQGREPIIKENTQNTAQQAEIVAVITAFEEVSQPFNLYTDSKYVTGLFPEIETATLSPRTKIYTELKHLQRLIHKRQEKFYIGHIRGHTGLPGPLAQGNAYADSLTRILTAGKRTADGSEFEKRTADGSEFESPKKKAKVE

SEQ ID NO: 3225 - protein, 2019 aa, synthetic construct
  source 1..2019: note = Description of Artificial Sequence: Synthetic polypeptide
MPAAKRVKLDGGDKKYSIGLDIGTNSVGWAVITDEYKVPSKKFKVLGNTDRHSIKKNLIGALLFDSGETAEATRLKRTARRRYTRRKNRICYLQEIFSNEMAKVDDSFFHRLEESFLVEEDKKHERHPIFGNIVDEVAYHEKYPTIYHLRKKLVDSTDKADLRLIYLALAHMIKFRGHFLIEGDLNPDNSDVDKLFIQLVQTYNQLFEENPINASGVDAKAILSARLSKSRRLENLIAQLPGEKKNGLFGNLIALSLGLTPNFKSNFDLAEDAKLQLSKDTYDDDLDNLLAQIGDQYADLFLAAKNLSDAILLSDILRVNTEITKAPLSASMIKRYDEHHQDLTLLKALVRQQLPEKYKEIFFDQSKNGYAGYIDGGASQEEFYKFIKPILEKMDGTEELLVKLNREDLLRKQRTFDNGSIPHQIHLGELHAILRRQEDFYPFLKDNREKIEKILTFRIPYYVGPLARGNSRFAWMTRKSEETITPWNFEEVVDKGASAQSFIERMTNFDKNLPNEKVLPKHSLLYEYFTVYNELTKVKYVTEGMRKPAFLSGEQKKAIVDLLFKTNRKVTVKQLKEDYFKKIECFDSVEISGVEDRFNASLGTYHDLLKIIKDKDFLDNEENEDILEDIVLTLTLFEDREMIEERLKTYAHLFDDKVMKQLKRRRYTGWGRLSRKLINGIRDKQSGKTILDFLKSDGFANRNFMQLIHDDSLTFKEDIQKAQVSGQGDSLHEHIANLAGSPAIKKGILQTVKVVDELVKVMGRHKPENIVIEMARENQTTQKGQKNSRERMKRIEEGIKELGSQILKEHPVENTQLQNEKLYLYYLQNGRDMYVDQELDINRLSDYDVDHIVPQSFLKDDSIDNKVLTRSDKARGKSDNVPSEEVVKKMKNYWRQLLNAKLITQRKFDNLTKAERGGLSELDKAGFIKRQLVETRQITKHVAQILDSRMNTKYDENDKLIREVKVITLKSKLVSDFRKDFQFYKVREINNYHHAHDAYLNAVVGTALIKKYPKLESEFVYGDYKVYDVRKMIAKSEQEIGKATAKYFFYSNIMNFFKTEITLANGEIRKRPLIETNGETGEIVWDKGRDFATVRKVLSMPQVNIVKKTEVQTGGFSKESILPKRNSDKLIARKKDWDPKKYGGFDSPTVAYSVLVVAKVEKGKSKKLKSVKELLGITIMERSSFEKNPIDFLEAKGYKEVKKDLIIKLPKYSLFELENGRKRMLASAGELQKGNELALPSKYVNFLYLASHYEKLKGSPEDNEQKQLFVEQHKHYLDEIIEQISEFSKRVILADANLDKVLSAYNKHRDKPIREQAENIIHLFTLTNLGAPAAFKYFDTTIDRKRYTSTKEVLDATLIHQSITGLYETRIDLSQLGGDGGGGGGGSGGGRDIMKDIKVRLMTDSPDDSQDLMIGAIESNLFADQISWKSDQPVWLNQWPLKQEKLQALQQLVTEQLQLGHLEESNSPWNTPVFVIKKKSGKWRLLQDLRAVNATMHDMGALQPGLPSPVAVPKGWEIIIIDLQDCFFNIKLHPEDCKRFAFSVPSPNFKRPYQRFQWKVLPQGMKNSPTLCQKFVDKAILTVRDKYQDSYIVHYMDDILLAHPSRSIVDEILTSMIQALNKHGLVVSTEKIQKYDNLKYLGTHIQGDSVSYQKLQIRTDKLRTLNDFQKLLGNINWIRPFLKLTTGELKPLFEILNGDSNPISTRKLTPEACKALQLMNERLSTARVKRLDLSQPWSLCILKTEYTPTACLWQDGVVEWIHLPHISPKVITPYDIFCTQLIIKGRHRSKELFSKDPDYIVVPYTKVQFDLLLQEKEDWPISLLGFLGEVHFHLPKDPLLTFTLQTAIIFPHMTSTTPLEKGIVIFTDGSANGRSVTYIQGREPIIKENTQNTAQQAEIVAVITAFEEVSQPFNLYTDSKYVTGLFPEIETATLSPRTKIYTELKHLQRLIHKRQEKFYIGHIRGHTGLPGPLAQGNAYADSLTRILTAGKRTADGSEFEKRTADGSEFESPKKKAKVE

SEQ ID NO: 3226 - protein, 2024 aa, synthetic construct
  source 1..2024: note = Description of Artificial Sequence: Synthetic polypeptide
MPAAKRVKLDGGDKKYSIGLDIGTNSVGWAVITDEYKVPSKKFKVLGNTDRHSIKKNLIGALLFDSGETAEATRLKRTARRRYTRRKNRICYLQEIFSNEMAKVDDSFFHRLEESFLVEEDKKHERHPIFGNIVDEVAYHEKYPTIYHLRKKLVDSTDKADLRLIYLALAHMIKFRGHFLIEGDLNPDNSDVDKLFIQLVQTYNQLFEENPINASGVDAKAILSARLSKSRRLENLIAQLPGEKKNGLFGNLIALSLGLTPNFKSNFDLAEDAKLQLSKDTYDDDLDNLLAQIGDQYADLFLAAKNLSDAILLSDILRVNTEITKAPLSASMIKRYDEHHQDLTLLKALVRQQLPEKYKEIFFDQSKNGYAGYIDGGASQEEFYKFIKPILEKMDGTEELLVKLNREDLLRKQRTFDNGSIPHQIHLGELHAILRRQEDFYPFLKDNREKIEKILTFRIPYYVGPLARGNSRFAWMTRKSEETITPWNFEEVVDKGASAQSFIERMTNFDKNLPNEKVLPKHSLLYEYFTVYNELTKVKYVTEGMRKPAFLSGEQKKAIVDLLFKTNRKVTVKQLKEDYFKKIECFDSVEISGVEDRFNASLGTYHDLLKIIKDKDFLDNEENEDILEDIVLTLTLFEDREMIEERLKTYAHLFDDKVMKQLKRRRYTGWGRLSRKLINGIRDKQSGKTILDFLKSDGFANRNFMQLIHDDSLTFKEDIQKAQVSGQGDSLHEHIANLAGSPAIKKGILQTVKVVDELVKVMGRHKPENIVIEMARENQTTQKGQKNSRERMKRIEEGIKELGSQILKEHPVENTQLQNEKLYLYYLQNGRDMYVDQELDINRLSDYDVDHIVPQSFLKDDSIDNKVLTRSDKARGKSDNVPSEEVVKKMKNYWRQLLNAKLITQRKFDNLTKAERGGLSELDKAGFIKRQLVETRQITKHVAQILDSRMNTKYDENDKLIREVKVITLKSKLVSDFRKDFQFYKVREINNYHHAHDAYLNAVVGTALIKKYPKLESEFVYGDYKVYDVRKMIAKSEQEIGKATAKYFFYSNIMNFFKTEITLANGEIRKRPLIETNGETGEIVWDKGRDFATVRKVLSMPQVNIVKKTEVQTGGFSKESILPKRNSDKLIARKKDWDPKKYGGFDSPTVAYSVLVVAKVEKGKSKKLKSVKELLGITIMERSSFEKNPIDFLEAKGYKEVKKDLIIKLPKYSLFELENGRKRMLASAGELQKGNELALPSKYVNFLYLASHYEKLKGSPEDNEQKQLFVEQHKHYLDEIIEQISEFSKRVILADANLDKVLSAYNKHRDKPIREQAENIIHLFTLTNLGAPAAFKYFDTTIDRKRYTSTKEVLDATLIHQSITGLYETRIDLSQLGGDGGEAAAKGGGGGSGGGRDIMKDIKVRLMTDSPDDSQDLMIGAIESNLFADQISWKSDQPVWLNQWPLKQEKLQALQQLVTEQLQLGHLEESNSPWNTPVFVIKKKSGKWRLLQDLRAVNATMHDMGALQPGLPSPVAVPKGWEIIIIDLQDCFFNIKLHPEDCKRFAFSVPSPNFKRPYQRFQWKVLPQGMKNSPTLCQKFVDKAILTVRDKYQDSYIVHYMDDILLAHPSRSIVDEILTSMIQALNKHGLVVSTEKIQKYDNLKYLGTHIQGDSVSYQKLQIRTDKLRTLNDFQKLLGNINWIRPFLKLTTGELKPLFEILNGDSNPISTRKLTPEACKALQLMNERLSTARVKRLDLSQPWSLCILKTEYTPTACLWQDGVVEWIHLPHISPKVITPYDIFCTQLIIKGRHRSKELFSKDPDYIVVPYTKVQFDLLLQEKEDWPISLLGFLGEVHFHLPKDPLLTFTLQTAIIFPHMTSTTPLEKGIVIFTDGSANGRSVTYIQGREPIIKENTQNTAQQAEIVAVITAFEEVSQPFNLYTDSKYVTGLFPEIETATLSPRTKIYTELKHLQRLIHKRQEKFYIGHIRGHTGLPGPLAQGNAYADSLTRILTAGKRTADGSEFEKRTADGSEFESPKKKAKVE

SEQ ID NO: 3227 - protein, 2019 aa, synthetic construct
  source 1..2019: note = Description of Artificial Sequence: Synthetic polypeptide
MPAAKRVKLDGGDKKYSIGLDIGTNSVGWAVITDEYKVPSKKFKVLGNTDRHSIKKNLIGALLFDSGETAEATRLKRTARRRYTRRKNRICYLQEIFSNEMAKVDDSFFHRLEESFLVEEDKKHERHPIFGNIVDEVAYHEKYPTIYHLRKKLVDSTDKADLRLIYLALAHMIKFRGHFLIEGDLNPDNSDVDKLFIQLVQTYNQLFEENPINASGVDAKAILSARLSKSRRLENLIAQLPGEKKNGLFGNLIALSLGLTPNFKSNFDLAEDAKLQLSKDTYDDDLDNLLAQIGDQYADLFLAAKNLSDAILLSDILRVNTEITKAPLSASMIKRYDEHHQDLTLLKALVRQQLPEKYKEIFFDQSKNGYAGYIDGGASQEEFYKFIKPILEKMDGTEELLVKLNREDLLRKQRTFDNGSIPHQIHLGELHAILRRQEDFYPFLKDNREKIEKILTFRIPYYVGPLARGNSRFAWMTRKSEETITPWNFEEVVDKGASAQSFIERMTNFDKNLPNEKVLPKHSLLYEYFTVYNELTKVKYVTEGMRKPAFLSGEQKKAIVDLLFKTNRKVTVKQLKEDYFKKIECFDSVEISGVEDRFNASLGTYHDLLKIIKDKDFLDNEENEDILEDIVLTLTLFEDREMIEERLKTYAHLFDDKVMKQLKRRRYTGWGRLSRKLINGIRDKQSGKTILDFLKSDGFANRNFMQLIHDDSLTFKEDIQKAQVSGQGDSLHEHIANLAGSPAIKKGILQTVKVVDELVKVMGRHKPENIVIEMARENQTTQKGQKNSRERMKRIEEGIKELGSQILKEHPVENTQLQNEKLYLYYLQNGRDMYVDQELDINRLSDYDVDHIVPQSFLKDDSIDNKVLTRSDKARGKSDNVPSEEVVKKMKNYWRQLLNAKLITQRKFDNLTKAERGGLSELDKAGFIKRQLVETRQITKHVAQILDSRMNTKYDENDKLIREVKVITLKSKLVSDFRKDFQFYKVREINNYHHAHDAYLNAVVGTALIKKYPKLESEFVYGDYKVYDVRKMIAKSEQEIGKATAKYFFYSNIMNFFKTEITLANGEIRKRPLIETNGETGEIVWDKGRDFATVRKVLSMPQVNIVKKTEVQTGGFSKESILPKRNSDKLIARKKDWDPKKYGGFDSPTVAYSVLVVAKVEKGKSKKLKSVKELLGITIMERSSFEKNPIDFLEAKGYKEVKKDLIIKLPKYSLFELENGRKRMLASAGELQKGNELALPSKYVNFLYLASHYEKLKGSPEDNEQKQLFVEQHKHYLDEIIEQISEFSKRVILADANLDKVLSAYNKHRDKPIREQAENIIHLFTLTNLGAPAAFKYFDTTIDRKRYTSTKEVLDATLIHQSITGLYETRIDLSQLGGDGGGGSPAPGGGRDIMKDIKVRLMTDSPDDSQDLMIGAIESNLFADQISWKSDQPVWLNQWPLKQEKLQALQQLVTEQLQLGHLEESNSPWNTPVFVIKKKSGKWRLLQDLRAVNATMHDMGALQPGLPSPVAVPKGWEIIIIDLQDCFFNIKLHPEDCKRFAFSVPSPNFKRPYQRFQWKVLPQGMKNSPTLCQKFVDKAILTVRDKYQDSYIVHYMDDILLAHPSRSIVDEILTSMIQALNKHGLVVSTEKIQKYDNLKYLGTHIQGDSVSYQKLQIRTDKLRTLNDFQKLLGNINWIRPFLKLTTGELKPLFEILNGDSNPISTRKLTPEACKALQLMNERLSTARVKRLDLSQPWSLCILKTEYTPTACLWQDGVVEWIHLPHISPKVITPYDIFCTQLIIKGRHRSKELFSKDPDYIVVPYTKVQFDLLLQEKEDWPISLLGFLGEVHFHLPKDPLLTFTLQTAIIFPHMTSTTPLEKGIVIFTDGSANGRSVTYIQGREPIIKENTQNTAQQAEIVAVITAFEEVSQPFNLYTDSKYVTGLFPEIETATLSPRTKIYTELKHLQRLIHKRQEKFYIGHIRGHTGLPGPLAQGNAYADSLTRILTAGKRTADGSEFEKRTADGSEFESPKKKAKVE

SEQ ID NO: 3228 - protein, 2024 aa, synthetic construct
  source 1..2024: note = Description of Artificial Sequence: Synthetic polypeptide
MPAAKRVKLDGGDKKYSIGLDIGTNSVGWAVITDEYKVPSKKFKVLGNTDRHSIKKNLIGALLFDSGETAEATRLKRTARRRYTRRKNRICYLQEIFSNEMAKVDDSFFHRLEESFLVEEDKKHERHPIFGNIVDEVAYHEKYPTIYHLRKKLVDSTDKADLRLIYLALAHMIKFRGHFLIEGDLNPDNSDVDKLFIQLVQTYNQLFEENPINASGVDAKAILSARLSKSRRLENLIAQLPGEKKNGLFGNLIALSLGLTPNFKSNFDLAEDAKLQLSKDTYDDDLDNLLAQIGDQYADLFLAAKNLSDAILLSDILRVNTEITKAPLSASMIKRYDEHHQDLTLLKALVRQQLPEKYKEIFFDQSKNGYAGYIDGGASQEEFYKFIKPILEKMDGTEELLVKLNREDLLRKQRTFDNGSIPHQIHLGELHAILRRQEDFYPFLKDNREKIEKILTFRIPYYVGPLARGNSRFAWMTRKSEETITPWNFEEVVDKGASAQSFIERMTNFDKNLPNEKVLPKHSLLYEYFTVYNELTKVKYVTEGMRKPAFLSGEQKKAIVDLLFKTNRKVTVKQLKEDYFKKIECFDSVEISGVEDRFNASLGTYHDLLKIIKDKDFLDNEENEDILEDIVLTLTLFEDREMIEERLKTYAHLFDDKVMKQLKRRRYTGWGRLSRKLINGIRDKQSGKTILDFLKSDGFANRNFMQLIHDDSLTFKEDIQKAQVSGQGDSLHEHIANLAGSPAIKKGILQTVKVVDELVKVMGRHKPENIVIEMARENQTTQKGQKNSRERMKRIEEGIKELGSQILKEHPVENTQLQNEKLYLYYLQNGRDMYVDQELDINRLSDYDVDHIVPQSFLKDDSIDNKVLTRSDKARGKSDNVPSEEVVKKMKNYWRQLLNAKLITQRKFDNLTKAERGGLSELDKAGFIKRQLVETRQITKHVAQILDSRMNTKYDENDKLIREVKVITLKSKLVSDFRKDFQFYKVREINNYHHAHDAYLNAVVGTALIKKYPKLESEFVYGDYKVYDVRKMIAKSEQEIGKATAKYFFYSNIMNFFKTEITLANGEIRKRPLIETNGETGEIVWDKGRDFATVRKVLSMPQVNIVKKTEVQTGGFSKESILPKRNSDKLIARKKDWDPKKYGGFDSPTVAYSVLVVAKVEKGKSKKLKSVKELLGITIMERSSFEKNPIDFLEAKGYKEVKKDLIIKLPKYSLFELENGRKRMLASAGELQKGNELALPSKYVNFLYLASHYEKLKGSPEDNEQKQLFVEQHKHYLDEIIEQISEFSKRVILADANLDKVLSAYNKHRDKPIREQAENIIHLFTLTNLGAPAAFKYFDTTIDRKRYTSTKEVLDATLIHQSITGLYETRIDLSQLGGDGGEAAAKGGSGGGGGGRDIMKDIKVRLMTDSPDDSQDLMIGAIESNLFADQISWKSDQPVWLNQWPLKQEKLQALQQLVTEQLQLGHLEESNSPWNTPVFVIKKKSGKWRLLQDLRAVNATMHDMGALQPGLPSPVAVPKGWEIIIIDLQDCFFNIKLHPEDCKRFAFSVPSPNFKRPYQRFQWKVLPQGMKNSPTLCQKFVDKAILTVRDKYQDSYIVHYMDDILLAHPSRSIVDEILTSMIQALNKHGLVVSTEKIQKYDNLKYLGTHIQGDSVSYQKLQIRTDKLRTLNDFQKLLGNINWIRPFLKLTTGELKPLFEILNGDSNPISTRKLTPEACKALQLMNERLSTARVKRLDLSQPWSLCILKTEYTPTACLWQDGVVEWIHLPHISPKVITPYDIFCTQLIIKGRHRSKELFSKDPDYIVVPYTKVQFDLLLQEKEDWPISLLGFLGEVHFHLPKDPLLTFTLQTAIIFPHMTSTTPLEKGIVIFTDGSANGRSVTYIQGREPIIKENTQNTAQQAEIVAVITAFEEVSQPFNLYTDSKYVTGLFPEIETATLSPRTKIYTELKHLQRLIHKRQEKFYIGHIRGHTGLPGPLAQGNAYADSLTRILTAGKRTADGSEFEKRTADGSEFESPKKKAKVE

SEQ ID NO: 3229 - protein, 2022 aa, synthetic construct
  source 1..2022: note = Description of Artificial Sequence: Synthetic polypeptide
MPAAKRVKLDGGDKKYSIGLDIGTNSVGWAVITDEYKVPSKKFKVLGNTDRHSIKKNLIGALLFDSGETAEATRLKRTARRRYTRRKNRICYLQEIFSNEMAKVDDSFFHRLEESFLVEEDKKHERHPIFGNIVDEVAYHEKYPTIYHLRKKLVDSTDKADLRLIYLALAHMIKFRGHFLIEGDLNPDNSDVDKLFIQLVQTYNQLFEENPINASGVDAKAILSARLSKSRRLENLIAQLPGEKKNGLFGNLIALSLGLTPNFKSNFDLAEDAKLQLSKDTYDDDLDNLLAQIGDQYADLFLAAKNLSDAILLSDILRVNTEITKAPLSASMIKRYDEHHQDLTLLKALVRQQLPEKYKEIFFDQSKNGYAGYIDGGASQEEFYKFIKPILEKMDGTEELLVKLNREDLLRKQRTFDNGSIPHQIHLGELHAILRRQEDFYPFLKDNREKIEKILTFRIPYYVGPLARGNSRFAWMTRKSEETITPWNFEEVVDKGASAQSFIERMTNFDKNLPNEKVLPKHSLLYEYFTVYNELTKVKYVTEGMRKPAFLSGEQKKAIVDLLFKTNRKVTVKQLKEDYFKKIECFDSVEISGVEDRFNASLGTYHDLLKIIKDKDFLDNEENEDILEDIVLTLTLFEDREMIEERLKTYAHLFDDKVMKQLKRRRYTGWGRLSRKLINGIRDKQSGKTILDFLKSDGFANRNFMQLIHDDSLTFKEDIQKAQVSGQGDSLHEHIANLAGSPAIKKGILQTVKVVDELVKVMGRHKPENIVIEMARENQTTQKGQKNSRERMKRIEEGIKELGSQILKEHPVENTQLQNEKLYLYYLQNGRDMYVDQELDINRLSDYDVDHIVPQSFLKDDSIDNKVLTRSDKARGKSDNVPSEEVVKKMKNYWRQLLNAKLITQRKFDNLTKAERGGLSELDKAGFIKRQLVETRQITKHVAQILDSRMNTKYDENDKLIREVKVITLKSKLVSDFRKDFQFYKVREINNYHHAHDAYLNAVVGTALIKKYPKLESEFVYGDYKVYDVRKMIAKSEQEIGKATAKYFFYSNIMNFFKTEITLANGEIRKRPLIETNGETGEIVWDKGRDFATVRKVLSMPQVNIVKKTEVQTGGFSKESILPKRNSDKLIARKKDWDPKKYGGFDSPTVAYSVLVVAKVEKGKSKKLKSVKELLGITIMERSSFEKNPIDFLEAKGYKEVKKDLIIKLPKYSLFELENGRKRMLASAGELQKGNELALPSKYVNFLYLASHYEKLKGSPEDNEQKQLFVEQHKHYLDEIIEQISEFSKRVILADANLDKVLSAYNKHRDKPIREQAENIIHLFTLTNLGAPAAFKYFDTTIDRKRYTSTKEVLDATLIHQSITGLYETRIDLSQLGGDGGGGSPAPGSSGGGRDIMKDIKVRLMTDSPDDSQDLMIGAIESNLFADQISWKSDQPVWLNQWPLKQEKLQALQQLVTEQLQLGHLEESNSPWNTPVFVIKKKSGKWRLLQDLRAVNATMHDMGALQPGLPSPVAVPKGWEIIIIDLQDCFFNIKLHPEDCKRFAFSVPSPNFKRPYQRFQWKVLPQGMKNSPTLCQKFVDKAILTVRDKYQDSYIVHYMDDILLAHPSRSIVDEILTSMIQALNKHGLVVSTEKIQKYDNLKYLGTHIQGDSVSYQKLQIRTDKLRTLNDFQKLLGNINWIRPFLKLTTGELKPLFEILNGDSNPISTRKLTPEACKALQLMNERLSTARVKRLDLSQPWSLCILKTEYTPTACLWQDGVVEWIHLPHISPKVITPYDIFCTQLIIKGRHRSKELFSKDPDYIVVPYTKVQFDLLLQEKEDWPISLLGFLGEVHFHLPKDPLLTFTLQTAIIFPHMTSTTPLEKGIVIFTDGSANGRSVTYIQGREPIIKENTQNTAQQAEIVAVITAFEEVSQPFNLYTDSKYVTGLFPEIETATLSPRTKIYTELKHLQRLIHKRQEKFYIGHIRGHTGLPGPLAQGNAYADSLTRILTAGKRTADGSEFEKRTADGSEFESPKKKAKVE

SEQ ID NO: 3230 - protein, 2024 aa, synthetic construct
  source 1..2024: note = Description of Artificial Sequence: Synthetic polypeptide
MPAAKRVKLDGGDKKYSIGLDIGTNSVGWAVITDEYKVPSKKFKVLGNTDRHSIKKNLIGALLFDSGETAEATRLKRTARRRYTRRKNRICYLQEIFSNEMAKVDDSFFHRLEESFLVEEDKKHERHPIFGNIVDEVAYHEKYPTIYHLRKKLVDSTDKADLRLIYLALAHMIKFRGHFLIEGDLNPDNSDVDKLFIQLVQTYNQLFEENPINASGVDAKAILSARLSKSRRLENLIAQLPGEKKNGLFGNLIALSLGLTPNFKSNFDLAEDAKLQLSKDTYDDDLDNLLAQIGDQYADLFLAAKNLSDAILLSDILRVNTEITKAPLSASMIKRYDEHHQDLTLLKALVRQQLPEKYKEIFFDQSKNGYAGYIDGGASQEEFYKFIKPILEKMDGTEELLVKLNREDLLRKQRTFDNGSIPHQIHLGELHAILRRQEDFYPFLKDNREKIEKILTFRIPYYVGPLARGNSRFAWMTRKSEETITPWNFEEVVDKGASAQSFIERMTNFDKNLPNEKVLPKHSLLYEYFTVYNELTKVKYVTEGMRKPAFLSGEQKKAIVDLLFKTNRKVTVKQLKEDYFKKIECFDSVEISGVEDRFNASLGTYHDLLKIIKDKDFLDNEENEDILEDIVLTLTLFEDREMIEERLKTYAHLFDDKVMKQLKRRRYTGWGRLSRKLINGIRDKQSGKTILDFLKSDGFANRNFMQLIHDDSLTFKEDIQKAQVSGQGDSLHEHIANLAGSPAIKKGILQTVKVVDELVKVMGRHKPENIVIEMARENQTTQKGQKNSRERMKRIEEGIKELGSQILKEHPVENTQLQNEKLYLYYLQNGRDMYVDQELDINRLSDYDVDHIVPQSFLKDDSIDNKVLTRSDKARGKSDNVPSEEVVKKMKNYWRQLLNAKLITQRKFDNLTKAERGGLSELDKAGFIKRQLVETRQITKHVAQILDSRMNTKYDENDKLIREVKVITLKSKLVSDFRKDFQFYKVREINNYHHAHDAYLNAVVGTALIKKYPKLESEFVYGDYKVYDVRKMIAKSEQEIGKATAKYFFYSNIMNFFKTEITLANGEIRKRPLIETNGETGEIVWDKGRDFATVRKVLSMPQVNIVKKTEVQTGGFSKESILPKRNSDKLIARKKDWDPKKYGGFDSPTVAYSVLVVAKVEKGKSKKLKSVKELLGITIMERSSFEKNPIDFLEAKGYKEVKKDLIIKLPKYSLFELENGRKRMLASAGELQKGNELALPSKYVNFLYLASHYEKLKGSPEDNEQKQLFVEQHKHYLDEIIEQISEFSKRVILADANLDKVLSAYNKHRDKPIREQAENIIHLFTLTNLGAPAAFKYFDTTIDRKRYTSTKEVLDATLIHQSITGLYETRIDLSQLGGDGGEAAAKGGSGSSGGGRDIMKDIKVRLMTDSPDDSQDLMIGAIESNLFADQISWKSDQPVWLNQWPLKQEKLQALQQLVTEQLQLGHLEESNSPWNTPVFVIKKKSGKWRLLQDLRAVNATMHDMGALQPGLPSPVAVPKGWEIIIIDLQDCFFNIKLHPEDCKRFAFSVPSPNFKRPYQRFQWKVLPQGMKNSPTLCQKFVDKAILTVRDKYQDSYIVHYMDDILLAHPSRSIVDEILTSMIQALNKHGLVVSTEKIQKYDNLKYLGTHIQGDSVSYQKLQIRTDKLRTLNDFQKLLGNINWIRPFLKLTTGELKPLFEILNGDSNPISTRKLTPEACKALQLMNERLSTARVKRLDLSQPWSLCILKTEYTPTACLWQDGVVEWIHLPHISPKVITPYDIFCTQLIIKGRHRSKELFSKDPDYIVVPYTKVQFDLLLQEKEDWPISLLGFLGEVHFHLPKDPLLTFTLQTAIIFPHMTSTTPLEKGIVIFTDGSANGRSVTYIQGREPIIKENTQNTAQQAEIVAVITAFEEVSQPFNLYTDSKYVTGLFPEIETATLSPRTKIYTELKHLQRLIHKRQEKFYIGHIRGHTGLPGPLAQGNAYADSLTRILTAGKRTADGSEFEKRTADGSEFESPKKKAKVE

SEQ ID NO: 3231 - protein, 2022 aa, synthetic construct
  source 1..2022: note = Description of Artificial Sequence: Synthetic polypeptide
MPAAKRVKLDGGDKKYSIGLDIGTNSVGWAVITDEYKVPSKKFKVLGNTDRHSIKKNLIGALLFDSGETAEATRLKRTARRRYTRRKNRICYLQEIFSNEMAKVDDSFFHRLEESFLVEEDKKHERHPIFGNIVDEVAYHEKYPTIYHLRKKLVDSTDKADLRLIYLALAHMIKFRGHFLIEGDLNPDNSDVDKLFIQLVQTYNQLFEENPINASGVDAKAILSARLSKSRRLENLIAQLPGEKKNGLFGNLIALSLGLTPNFKSNFDLAEDAKLQLSKDTYDDDLDNLLAQIGDQYADLFLAAKNLSDAILLSDILRVNTEITKAPLSASMIKRYDEHHQDLTLLKALVRQQLPEKYKEIFFDQSKNGYAGYIDGGASQEEFYKFIKPILEKMDGTEELLVKLNREDLLRKQRTFDNGSIPHQIHLGELHAILRRQEDFYPFLKDNREKIEKILTFRIPYYVGPLARGNSRFAWMTRKSEETITPWNFEEVVDKGASAQSFIERMTNFDKNLPNEKVLPKHSLLYEYFTVYNELTKVKYVTEGMRKPAFLSGEQKKAIVDLLFKTNRKVTVKQLKEDYFKKIECFDSVEISGVEDRFNASLGTYHDLLKIIKDKDFLDNEENEDILEDIVLTLTLFEDREMIEERLKTYAHLFDDKVMKQLKRRRYTGWGRLSRKLINGIRDKQSGKTILDFLKSDGFANRNFMQLIHDDSLTFKEDIQKAQVSGQGDSLHEHIANLAGSPAIKKGILQTVKVVDELVKVMGRHKPENIVIEMARENQTTQKGQKNSRERMKRIEEGIKELGSQILKEHPVENTQLQNEKLYLYYLQNGRDMYVDQELDINRLSDYDVDHIVPQSFLKDDSIDNKVLTRSDKARGKSDNVPSEEVVKKMKNYWRQLLNAKLITQRKFDNLTKAERGGLSELDKAGFIKRQLVETRQITKHVAQILDSRMNTKYDENDKLIREVKVITLKSKLVSDFRKDFQFYKVREINNYHHAHDAYLNAVVGTALIKKYPKLESEFVYGDYKVYDVRKMIAKSEQEIGKATAKYFFYSNIMNFFKTEITLANGEIRKRPLIETNGETGEIVWDKGRDFATVRKVLSMPQVNIVKKTEVQTGGFSKESILPKRNSDKLIARKKDWDPKKYGGFDSPTVAYSVLVVAKVEKGKSKKLKSVKELLGITIMERSSFEKNPIDFLEAKGYKEVKKDLIIKLPKYSLFELENGRKRMLASAGELQKGNELALPSKYVNFLYLASHYEKLKGSPEDNEQKQLFVEQHKHYLDEIIEQISEFSKRVILADANLDKVLSAYNKHRDKPIREQAENIIHLFTLTNLGAPAAFKYFDTTIDRKRYTSTKEVLDATLIHQSITGLYETRIDLSQLGGDGGGGGGSSPAPGGGRDIMKDIKVRLMTDSPDDSQDLMIGAIESNLFADQISWKSDQPVWLNQWPLKQEKLQALQQLVTEQLQLGHLEESNSPWNTPVFVIKKKSGKWRLLQDLRAVNATMHDMGALQPGLPSPVAVPKGWEIIIIDLQDCFFNIKLHPEDCKRFAFSVPSPNFKRPYQRFQWKVLPQGMKNSPTLCQKFVDKAILTVRDKYQDSYIVHYMDDILLAHPSRSIVDEILTSMIQALNKHGLVVSTEKIQKYDNLKYLGTHIQGDSVSYQKLQIRTDKLRTLNDFQKLLGNINWIRPFLKLTTGELKPLFEILNGDSNPISTRKLTPEACKALQLMNERLSTARVKRLDLSQPWSLCILKTEYTPTACLWQDGVVEWIHLPHISPKVITPYDIFCTQLIIKGRHRSKELFSKDPDYIVVPYTKVQFDLLLQEKEDWPISLLGFLGEVHFHLPKDPLLTFTLQTAIIFPHMTSTTPLEKGIVIFTDGSANGRSVTYIQGREPIIKENTQNTAQQAEIVAVITAFEEVSQPFNLYTDSKYVTGLFPEIETATLSPRTKIYTELKHLQRLIHKRQEKFYIGHIRGHTGLPGPLAQGNAYADSLTRILTAGKRTADGSEFEKRTADGSEFESPKKKAKVE

SEQ ID NO: 3232 - protein, 2024 aa, synthetic construct
  source 1..2024: note = Description of Artificial Sequence: Synthetic polypeptide
MPAAKRVKLDGGDKKYSIGLDIGTNSVGWAVITDEYKVPSKKFKVLGNTDRHSIKKNLIGALLFDSGETAEATRLKRTARRRYTRRKNRICYLQEIFSNEMAKVDDSFFHRLEESFLVEEDKKHERHPIFGNIVDEVAYHEKYPTIYHLRKKLVDSTDKADLRLIYLALAHMIKFRGHFLIEGDLNPDNSDVDKLFIQLVQTYNQLFEENPINASGVDAKAILSARLSKSRRLENLIAQLPGEKKNGLFGNLIALSLGLTPNFKSNFDLAEDAKLQLSKDTYDDDLDNLLAQIGDQYADLFLAAKNLSDAILLSDILRVNTEITKAPLSASMIKRYDEHHQDLTLLKALVRQQLPEKYKEIFFDQSKNGYAGYIDGGASQEEFYKFIKPILEKMDGTEELLVKLNREDLLRKQRTFDNGSIPHQIHLGELHAILRRQEDFYPFLKDNREKIEKILTFRIPYYVGPLARGNSRFAWMTRKSEETITPWNFEEVVDKGASAQSFIERMTNFDKNLPNEKVLPKHSLLYEYFTVYNELTKVKYVTEGMRKPAFLSGEQKKAIVDLLFKTNRKVTVKQLKEDYFKKIECFDSVEISGVEDRFNASLGTYHDLLKIIKDKDFLDNEENEDILEDIVLTLTLFEDREMIEERLKTYAHLFDDKVMKQLKRRRYTGWGRLSRKLINGIRDKQSGKTILDFLKSDGFANRNFMQLIHDDSLTFKEDIQKAQVSGQGDSLHEHIANLAGSPAIKKGILQTVKVVDELVKVMGRHKPENIVIEMARENQTTQKGQKNSRERMKRIEEGIKELGSQILKEHPVENTQLQNEKLYLYYLQNGRDMYVDQELDINRLSDYDVDHIVPQSFLKDDSIDNKVLTRSDKARGKSDNVPSEEVVKKMKNYWRQLLNAKLITQRKFDNLTKAERGGLSELDKAGFIKRQLVETRQITKHVAQILDSRMNTKYDENDKLIREVKVITLKSKLVSDFRKDFQFYKVREINNYHHAHDAYLNAVVGTALIKKYPKLESEFVYGDYKVYDVRKMIAKSEQEIGKATAKYFFYSNIMNFFKTEITLANGEIRKRPLIETNGETGEIVWDKGRDFATVRKVLSMPQVNIVKKTEVQTGGFSKESILPKRNSDKLIARKKDWDPKKYGGFDSPTVAYSVLVVAKVEKGKSKKLKSVKELLGITIMERSSFEKNPIDFLEAKGYKEVKKDLIIKLPKYSLFELENGRKRMLASAGELQKGNELALPSKYVNFLYLASHYEKLKGSPEDNEQKQLFVEQHKHYLDEIIEQISEFSKRVILADANLDKVLSAYNKHRDKPIREQAENIIHLFTLTNLGAPAAFKYFDTTIDRKRYTSTKEVLDATLIHQSITGLYETRIDLSQLGGDGGGSSPAPEAAAKGGGRDIMKDIKVRLMTDSPDDSQDLMIGAIESNLFADQISWKSDQPVWLNQWPLKQEKLQALQQLVTEQLQLGHLEESNSPWNTPVFVIKKKSGKWRLLQDLRAVNATMHDMGALQPGLPSPVAVPKGWEIIIIDLQDCFFNIKLHPEDCKRFAFSVPSPNFKRPYQRFQWKVLPQGMKNSPTLCQKFVDKAILTVRDKYQDSYIVHYMDDILLAHPSRSIVDEILTSMIQALNKHGLVVSTEKIQKYDNLKYLGTHIQGDSVSYQKLQIRTDKLRTLNDFQKLLGNINWIRPFLKLTTGELKPLFEILNGDSNPISTRKLTPEACKALQLMNERLSTARVKRLDLSQPWSLCILKTEYTPTACLWQDGVVEWIHLPHISPKVITPYDIFCTQLIIKGRHRSKELFSKDPDYIVVPYTKVQFDLLLQEKEDWPISLLGFLGEVHFHLPKDPLLTFTLQTAIIFPHMTSTTPLEKGIVIFTDGSANGRSVTYIQGREPIIKENTQNTAQQAEIVAVITAFEEVSQPFNLYTDSKYVTGLFPEIETATLSPRTKIYTELKHLQRLIHKRQEKFYIGHIRGHTGLPGPLAQGNAYADSLTRILTAGKRTADGSEFEKRTADGSEFESPKKKAKVE

SEQ ID NO: 3233 - protein, 2022 aa, synthetic construct
  source 1..2022: note = Description of Artificial Sequence: Synthetic polypeptide
MPAAKRVKLDGGDKKYSIGLDIGTNSVGWAVITDEYKVPSKKFKVLGNTDRHSIKKNLIGALLFDSGETAEATRLKRTARRRYTRRKNRICYLQEIFSNEMAKVDDSFFHRLEESFLVEEDKKHERHPIFGNIVDEVAYHEKYPTIYHLRKKLVDSTDKADLRLIYLALAHMIKFRGHFLIEGDLNPDNSDVDKLFIQLVQTYNQLFEENPINASGVDAKAILSARLSKSRRLENLIAQLPGEKKNGLFGNLIALSLGLTPNFKSNFDLAEDAKLQLSKDTYDDDLDNLLAQIGDQYADLFLAAKNLSDAILLSDILRVNTEITKAPLSASMIKRYDEHHQDLTLLKALVRQQLPEKYKEIFFDQSKNGYAGYIDGGASQEEFYKFIKPILEKMDGTEELLVKLNREDLLRKQRTFDNGSIPHQIHLGELHAILRRQEDFYPFLKDNREKIEKILTFRIPYYVGPLARGNSRFAWMTRKSEETITPWNFEEVVDKGASAQSFIERMTNFDKNLPNEKVLPKHSLLYEYFTVYNELTKVKYVTEGMRKPAFLSGEQKKAIVDLLFKTNRKVTVKQLKEDYFKKIECFDSVEISGVEDRFNASLGTYHDLLKIIKDKDFLDNEENEDILEDIVLTLTLFEDREMIEERLKTYAHLFDDKVMKQLKRRRYTGWGRLSRKLINGIRDKQSGKTILDFLKSDGFANRNFMQLIHDDSLTFKEDIQKAQVSGQGDSLHEHIANLAGSPAIKKGILQTVKVVDELVKVMGRHKPENIVIEMARENQTTQKGQKNSRERMKRIEEGIKELGSQILKEHPVENTQLQNEKLYLYYLQNGRDMYVDQELDINRLSDYDVDHIVPQSFLKDDSIDNKVLTRSDKARGKSDNVPSEEVVKKMKNYWRQLLNAKLITQRKFDNLTKAERGGLSELDKAGFIKRQLVETRQITKHVAQILDSRMNTKYDENDKLIREVKVITLKSKLVSDFRKDFQFYKVREINNYHHAHDAYLNAVVGTALIKKYPKLESEFVYGDYKVYDVRKMIAKSEQEIGKATAKYFFYSNIMNFFKTEITLANGEIRKRPLIETNGETGEIVWDKGRDFATVRKVLSMPQVNIVKKTEVQTGGFSKESILPKRNSDKLIARKKDWDPKKYGGFDSPTVAYSVLVVAKVEKGKSKKLKSVKELLGITIMERSSFEKNPIDFLEAKGYKEVKKDLIIKLPKYSLFELENGRKRMLASAGELQKGNELALPSKYVNFLYLASHYEKLKGSPEDNEQKQLFVEQHKHYLDEIIEQISEFSKRVILADANLDKVLSAYNKHRDKPIREQAENIIHLFTLTNLGAPAAFKYFDTTIDRKRYTSTKEVLDATLIHQSITGLYETRIDLSQLGGDGGPAPGGGGSSGGGRDIMKDIKVRLMTDSPDDSQDLMIGAIESNLFADQISWKSDQPVWLNQWPLKQEKLQALQQLVTEQLQLGHLEESNSPWNTPVFVIKKKSGKWRLLQDLRAVNATMHDMGALQPGLPSPVAVPKGWEIIIIDLQDCFFNIKLHPEDCKRFAFSVPSPNFKRPYQRFQWKVLPQGMKNSPTLCQKFVDKAILTVRDKYQDSYIVHYMDDILLAHPSRSIVDEILTSMIQALNKHGLVVSTEKIQKYDNLKYLGTHIQGDSVSYQKLQIRTDKLRTLNDFQKLLGNINWIRPFLKLTTGELKPLFEILNGDSNPISTRKLTPEACKALQLMNERLSTARVKRLDLSQPWSLCILKTEYTPTACLWQDGVVEWIHLPHISPKVITPYDIFCTQLIIKGRHRSKELFSKDPDYIVVPYTKVQFDLLLQEKEDWPISLLGFLGEVHFHLPKDPLLTFTLQTAIIFPHMTSTTPLEKGIVIFTDGSANGRSVTYIQGREPIIKENTQNTAQQAEIVAVITAFEEVSQPFNLYTDSKYVTGLFPEIETATLSPRTKIYTELKHLQRLIHKRQEKFYIGHIRGHTGLPGPLAQGNAYADSLTRILTAGKRTADGSEFEKRTADGSEFESPKKKAKVE

SEQ ID NO: 3234 - protein, 2022 aa, synthetic construct
  source 1..2022: note = Description of Artificial Sequence: Synthetic polypeptide
MPAAKRVKLDGGDKKYSIGLDIGTNSVGWAVITDEYKVPSKKFKVLGNTDRHSIKKNLIGALLFDSGETAEATRLKRTARRRYTRRKNRICYLQEIFSNEMAKVDDSFFHRLEESFLVEEDKKHERHPIFGNIVDEVAYHEKYPTIYHLRKKLVDSTDKADLRLIYLALAHMIKFRGHFLIEGDLNPDNSDVDKLFIQLVQTYNQLFEENPINASGVDAKAILSARLSKSRRLENLIAQLPGEKKNGLFGNLIALSLGLTPNFKSNFDLAEDAKLQLSKDTYDDDLDNLLAQIGDQYADLFLAAKNLSDAILLSDILRVNTEITKAPLSASMIKRYDEHHQDLTLLKALVRQQLPEKYKEIFFDQSKNGYAGYIDGGASQEEFYKFIKPILEKMDGTEELLVKLNREDLLRKQRTFDNGSIPHQIHLGELHAILRRQEDFYPFLKDNREKIEKILTFRIPYYVGPLARGNSRFAWMTRKSEETITPWNFEEVVDKGASAQSFIERMTNFDKNLPNEKVLPKHSLLYEYFTVYNELTKVKYVTEGMRKPAFLSGEQKKAIVDLLFKTNRKVTVKQLKEDYFKKIECFDSVEISGVEDRFNASLGTYHDLLKIIKDKDFLDNEENEDILEDIVLTLTLFEDREMIEERLKTYAHLFDDKVMKQLKRRRYTGWGRLSRKLINGIRDKQSGKTILDFLKSDGFANRNFMQLIHDDSLTFKEDIQKAQVSGQGDSLHEHIANLAGSPAIKKGILQTVKVVDELVKVMGRHKPENIVIEMARENQTTQKGQKNSRERMKRIEEGIKELGSQILKEHPVENTQLQNEKLYLYYLQNGRDMYVDQELDINRLSDYDVDHIVPQSFLKDDSIDNKVLTRSDKARGKSDNVPSEEVVKKMKNYWRQLLNAKLITQRKFDNLTKAERGGLSELDKAGFIKRQLVETRQITKHVAQILDSRMNTKYDENDKLIREVKVITLKSKLVSDFRKDFQFYKVREINNYHHAHDAYLNAVVGTALIKKYPKLESEFVYGDYKVYDVRKMIAKSEQEIGKATAKYFFYSNIMNFFKTEITLANGEIRKRPLIETNGETGEIVWDKGRDFATVRKVLSMPQVNIVKKTEVQTGGFSKESILPKRNSDKLIARKKDWDPKKYGGFDSPTVAYSVLVVAKVEKGKSKKLKSVKELLGITIMERSSFEKNPIDFLEAKGYKEVKKDLIIKLPKYSLFELENGRKRMLASAGELQKGNELALPSKYVNFLYLASHYEKLKGSPEDNEQKQLFVEQHKHYLDEIIEQISEFSKRVILADANLDKVLSAYNKHRDKPIREQAENIIHLFTLTNLGAPAAFKYFDTTIDRKRYTSTKEVLDATLIHQSITGLYETRIDLSQLGGDGGPAPGGSGGGGGGRDIMKDIKVRLMTDSPDDSQDLMIGAIESNLFADQISWKSDQPVWLNQWPLKQEKLQALQQLVTEQLQLGHLEESNSPWNTPVFVIKKKSGKWRLLQDLRAVNATMHDMGALQPGLPSPVAVPKGWEIIIIDLQDCFFNIKLHPEDCKRFAFSVPSPNFKRPYQRFQWKVLPQGMKNSPTLCQKFVDKAILTVRDKYQDSYIVHYMDDILLAHPSRSIVDEILTSMIQALNKHGLVVSTEKIQKYDNLKYLGTHIQGDSVSYQKLQIRTDKLRTLNDFQKLLGNINWIRPFLKLTTGELKPLFEILNGDSNPISTRKLTPEACKALQLMNERLSTARVKRLDLSQPWSLCILKTEYTPTACLWQDGVVEWIHLPHISPKVITPYDIFCTQLIIKGRHRSKELFSKDPDYIVVPYTKVQFDLLLQEKEDWPISLLGFLGEVHFHLPKDPLLTFTLQTAIIFPHMTSTTPLEKGIVIFTDGSANGRSVTYIQGREPIIKENTQNTAQQAEIVAVITAFEEVSQPFNLYTDSKYVTGLFPEIETATLSPRTKIYTELKHLQRLIHKRQEKFYIGHIRGHTGLPGPLAQGNAYADSLTRILTAGKRTADGSEFEKRTADGSEFESPKKKAKVE

SEQ ID NO: 3235 - protein, 2024 aa, synthetic construct
  source 1..2024: note = Description of Artificial Sequence: Synthetic polypeptide
MPAAKRVKLDGGDKKYSIGLDIGTNSVGWAVITDEYKVPSKKFKVLGNTDRHSIKKNLIGALLFDSGETAEATRLKRTARRRYTRRKNRICYLQEIFSNEMAKVDDSFFHRLEESFLVEEDKKHERHPIFGNIVDEVAYHEKYPTIYHLRKKLVDSTDKADLRLIYLALAHMIKFRGHFLIEGDLNPDNSDVDKLFIQLVQTYNQLFEENPINASGVDAKAILSARLSKSRRLENLIAQLPGEKKNGLFGNLIALSLGLTPNFKSNFDLAEDAKLQLSKDTYDDDLDNLLAQIGDQYADLFLAAKNLSDAILLSDILRVNTEITKAPLSASMIKRYDEHHQDLTLLKALVRQQLPEKYKEIFFDQSKNGYAGYIDGGASQEEFYKFIKPILEKMDGTEELLVKLNREDLLRKQRTFDNGSIPHQIHLGELHAILRRQEDFYPFLKDNREKIEKILTFRIPYYVGPLARGNSRFAWMTRKSEETITPWNFEEVVDKGASAQSFIERMTNFDKNLPNEKVLPKHSLLYEYFTVYNELTKVKYVTEGMRKPAFLSGEQKKAIVDLLFKTNRKVTVKQLKEDYFKKIECFDSVEISGVEDRFNASLGTYHDLLKIIKDKDFLDNEENEDILEDIVLTLTLFEDREMIEERLKTYAHLFDDKVMKQLKRRRYTGWGRLSRKLINGIRDKQSGKTILDFLKSDGFANRNFMQLIHDDSLTFKEDIQKAQVSGQGDSLHEHIANLAGSPAIKKGILQTVKVVDELVKVMGRHKPENIVIEMARENQTTQKGQKNSRERMKRIEEGIKELGSQILKEHPVENTQLQNEKLYLYYLQNGRDMYVDQELDINRLSDYDVDHIVPQSFLKDDSIDNKVLTRSDKARGKSDNVPSEEVVKKMKNYWRQLLNAKLITQRKFDNLTKAERGGLSELDKAGFIKRQLVETRQITKHVAQILDSRMNTKYDENDKLIREVKVITLKSKLVSDFRKDFQFYKVREINNYHHAHDAYLNAVVGTALIKKYPKLESEFVYGDYKVYDVRKMIAKSEQEIGKATAKYFFYSNIMNFFKTEITLANGEIRKRPLIETNGETGEIVWDKGRDFATVRKVLSMPQVNIVKKTEVQTGGFSKESILPKRNSDKLIARKKDWDPKKYGGFDSPTVAYSVLVVAKVEKGKSKKLKSVKELLGITIMERSSFEKNPIDFLEAKGYKEVKKDLIIKLPKYSLFELENGRKRMLASAGELQKGNELALPSKYVNFLYLASHYEKLKGSPEDNEQKQLFVEQHKHYLDEIIEQISEFSKRVILADANLDKVLSAYNKHRDKPIREQAENIIHLFTLTNLGAPAAFKYFDTTIDRKRYTSTKEVLDATLIHQSITGLYETRIDLSQLGGDGGGGSEAAAKGGGGGGRDIMKDIKVRLMTDSPDDSQDLMIGAIESNLFADQISWKSDQPVWLNQWPLKQEKLQALQQLVTEQLQLGHLEESNSPWNTPVFVIKKKSGKWRLLQDLRAVNATMHDMGALQPGLPSPVAVPKGWEIIIIDLQDCFFNIKLHPEDCKRFAFSVPSPNFKRPYQRFQWKVLPQGMKNSPTLCQKFVDKAILTVRDKYQDSYIVHYMDDILLAHPSRSIVDEILTSMIQALNKHGLVVSTEKIQKYDNLKYLGTHIQGDSVSYQKLQIRTDKLRTLNDFQKLLGNINWIRPFLKLTTGELKPLFEILNGDSNPISTRKLTPEACKALQLMNERLSTARVKRLDLSQPWSLCILKTEYTPTACLWQDGVVEWIHLPHISPKVITPYDIFCTQLIIKGRHRSKELFSKDPDYIVVPYTKVQFDLLLQEKEDWPISLLGFLGEVHFHLPKDPLLTFTLQTAIIFPHMTSTTPLEKGIVIFTDGSANGRSVTYIQGREPIIKENTQNTAQQAEIVAVITAFEEVSQPFNLYTDSKYVTGLFPEIETATLSPRTKIYTELKHLQRLIHKRQEKFYIGHIRGHTGLPGPLAQGNAYADSLTRILTAGKRTADGSEFEKRTADGSEFESPKKKAKVE

SEQ ID NO: 3236 - protein, 2024 aa, synthetic construct
  source 1..2024: note = Description of Artificial Sequence: Synthetic polypeptide
MPAAKRVKLDGGDKKYSIGLDIGTNSVGWAVITDEYKVPSKKFKVLGNTDRHSIKKNLIGALLFDSGETAEATRLKRTARRRYTRRKNRICYLQEIFSNEMAKVDDSFFHRLEESFLVEEDKKHERHPIFGNIVDEVAYHEKYPTIYHLRKKLVDSTDKADLRLIYLALAHMIKFRGHFLIEGDLNPDNSDVDKLFIQLVQTYNQLFEENPINASGVDAKAILSARLSKSRRLENLIAQLPGEKKNGLFGNLIALSLGLTPNFKSNFDLAEDAKLQLSKDTYDDDLDNLLAQIGDQYADLFLAAKNLSDAILLSDILRVNTEITKAPLSASMIKRYDEHHQDLTLLKALVRQQLPEKYKEIFFDQSKNGYAGYIDGGASQEEFYKFIKPILEKMDGTEELLVKLNREDLLRKQRTFDNGSIPHQIHLGELHAILRRQEDFYPFLKDNREKIEKILTFRIPYYVGPLARGNSRFAWMTRKSEETITPWNFEEVVDKGASAQSFIERMTNFDKNLPNEKVLPKHSLLYEYFTVYNELTKVKYVTEGMRKPAFLSGEQKKAIVDLLFKTNRKVTVKQLKEDYFKKIECFDSVEISGVEDRFNASLGTYHDLLKIIKDKDFLDNEENEDILEDIVLTLTLFEDREMIEERLKTYAHLFDDKVMKQLKRRRYTGWGRLSRKLINGIRDKQSGKTILDFLKSDGFANRNFMQLIHDDSLTFKEDIQKAQVSGQGDSLHEHIANLAGSPAIKKGILQTVKVVDELVKVMGRHKPENIVIEMARENQTTQKGQKNSRERMKRIEEGIKELGSQILKEHPVENTQLQNEKLYLYYLQNGRDMYVDQELDINRLSDYDVDHIVPQSFLKDDSIDNKVLTRSDKARGKSDNVPSEEVVKKMKNYWRQLLNAKLITQRKFDNLTKAERGGLSELDKAGFIKRQLVETRQITKHVAQILDSRMNTKYDENDKLIREVKVITLKSKLVSDFRKDFQFYKVREINNYHHAHDAYLNAVVGTALIKKYPKLESEFVYGDYKVYDVRKMIAKSEQEIGKATAKYFFYSNIMNFFKTEITLANGEIRKRPLIETNGETGEIVWDKGRDFATVRKVLSMPQVNIVKKTEVQTGGFSKESILPKRNSDKLIARKKDWDPKKYGGFDSPTVAYSVLVVAKVEKGKSKKLKSVKELLGITIMERSSFEKNPIDFLEAKGYKEVKKDLIIKLPKYSLFELENGRKRMLASAGELQKGNELALPSKYVNFLYLASHYEKLKGSPEDNEQKQLFVEQHKHYLDEIIEQISEFSKRVILADANLDKVLSAYNKHRDKPIREQAENIIHLFTLTNLGAPAAFKYFDTTIDRKRYTSTKEVLDATLIHQSITGLYETRIDLSQLGGDGGPAPEAAAKGSSGGGRDIMKDIKVRLMTDSPDDSQDLMIGAIESNLFADQISWKSDQPVWLNQWPLKQEKLQALQQLVTEQLQLGHLEESNSPWNTPVFVIKKKSGKWRLLQDLRAVNATMHDMGALQPGLPSPVAVPKGWEIIIIDLQDCFFNIKLHPEDCKRFAFSVPSPNFKRPYQRFQWKVLPQGMKNSPTLCQKFVDKAILTVRDKYQDSYIVHYMDDILLAHPSRSIVDEILTSMIQALNKHGLVVSTEKIQKYDNLKYLGTHIQGDSVSYQKLQIRTDKLRTLNDFQKLLGNINWIRPFLKLTTGELKPLFEILNGDSNPISTRKLTPEACKALQLMNERLSTARVKRLDLSQPWSLCILKTEYTPTACLWQDGVVEWIHLPHISPKVITPYDIFCTQLIIKGRHRSKELFSKDPDYIVVPYTKVQFDLLLQEKEDWPISLLGFLGEVHFHLPKDPLLTFTLQTAIIFPHMTSTTPLEKGIVIFTDGSANGRSVTYIQGREPIIKENTQNTAQQAEIVAVITAFEEVSQPFNLYTDSKYVTGLFPEIETATLSPRTKIYTELKHLQRLIHKRQEKFYIGHIRGHTGLPGPLAQGNAYADSLTRILTAGKRTADGSEFEKRTADGSEFESPKKKAKVE

SEQ ID NO: 3237 - protein, 2024 aa, synthetic construct
  source 1..2024: note = Description of Artificial Sequence: Synthetic polypeptide
MPAAKRVKLDGGDKKYSIGLDIGTNSVGWAVITDEYKVPSKKFKVLGNTDRHSIKKNLIGALLFDSGETAEATRLKRTARRRYTRRKNRICYLQEIFSNEMAKVDDSFFHRLEESFLVEEDKKHERHPIFGNIVDEVAYHEKYPTIYHLRKKLVDSTDKADLRLIYLALAHMIKFRGHFLIEGDLNPDNSDVDKLFIQLVQTYNQLFEENPINASGVDAKAILSARLSKSRRLENLIAQLPGEKKNGLFGNLIALSLGLTPNFKSNFDLAEDAKLQLSKDTYDDDLDNLLAQIGDQYADLFLAAKNLSDAILLSDILRVNTEITKAPLSASMIKRYDEHHQDLTLLKALVRQQLPEKYKEIFFDQSKNGYAGYIDGGASQEEFYKFIKPILEKMDGTEELLVKLNREDLLRKQRTFDNGSIPHQIHLGELHAILRRQEDFYPFLKDNREKIEKILTFRIPYYVGPLARGNSRFAWMTRKSEETITPWNFEEVVDKGASAQSFIERMTNFDKNLPNEKVLPKHSLLYEYFTVYNELTKVKYVTEGMRKPAFLSGEQKKAIVDLLFKTNRKVTVKQLKEDYFKKIECFDSVEISGVEDRFNASLGTYHDLLKIIKDKDFLDNEENEDILEDIVLTLTLFEDREMIEERLKTYAHLFDDKVMKQLKRRRYTGWGRLSRKLINGIRDKQSGKTILDFLKSDGFANRNFMQLIHDDSLTFKEDIQKAQVSGQGDSLHEHIANLAGSPAIKKGILQTVKVVDELVKVMGRHKPENIVIEMARENQTTQKGQKNSRERMKRIEEGIKELGSQILKEHPVENTQLQNEKLYLYYLQNGRDMYVDQELDINRLSDYDVDHIVPQSFLKDDSIDNKVLTRSDKARGKSDNVPSEEVVKKMKNYWRQLLNAKLITQRKFDNLTKAERGGLSELDKAGFIKRQLVETRQITKHVAQILDSRMNTKYDENDKLIREVKVITLKSKLVSDFRKDFQFYKVREINNYHHAHDAYLNAVVGTALIKKYPKLESEFVYGDYKVYDVRKMIAKSEQEIGKATAKYFFYSNIMNFFKTEITLANGEIRKRPLIETNGETGEIVWDKGRDFATVRKVLSMPQVNIVKKTEVQTGGFSKESILPKRNSDKLIARKKDWDPKKYGGFDSPTVAYSVLVVAKVEKGKSKKLKSVKELLGITIMERSSFEKNPIDFLEAKGYKEVKKDLIIKLPKYSLFELENGRKRMLASAGELQKGNELALPSKYVNFLYLASHYEKLKGSPEDNEQKQLFVEQHKHYLDEIIEQISEFSKRVILADANLDKVLSAYNKHRDKPIREQAENIIHLFTLTNLGAPAAFKYFDTTIDRKRYTSTKEVLDATLIHQSITGLYETRIDLSQLGGDGGGGSEAAAKPAPGGGRDIMKDIKVRLMTDSPDDSQDLMIGAIESNLFADQISWKSDQPVWLNQWPLKQEKLQALQQLVTEQLQLGHLEESNSPWNTPVFVIKKKSGKWRLLQDLRAVNATMHDMGALQPGLPSPVAVPKGWEIIIIDLQDCFFNIKLHPEDCKRFAFSVPSPNFKRPYQRFQWKVLPQGMKNSPTLCQKFVDKAILTVRDKYQDSYIVHYMDDILLAHPSRSIVDEILTSMIQALNKHGLVVSTEKIQKYDNLKYLGTHIQGDSVSYQKLQIRTDKLRTLNDFQKLLGNINWIRPFLKLTTGELKPLFEILNGDSNPISTRKLTPEACKALQLMNERLSTARVKRLDLSQPWSLCILKTEYTPTACLWQDGVVEWIHLPHISPKVITPYDIFCTQLIIKGRHRSKELFSKDPDYIVVPYTKVQFDLLLQEKEDWPISLLGFLGEVHFHLPKDPLLTFTLQTAIIFPHMTSTTPLEKGIVIFTDGSANGRSVTYIQGREPIIKENTQNTAQQAEIVAVITAFEEVSQPFNLYTDSKYVTGLFPEIETATLSPRTKIYTELKHLQRLIHKRQEKFYIGHIRGHTGLPGPLAQGNAYADSLTRILTAGKRTADGSEFEKRTADGSEFESPKKKAKVE

SEQ ID NO: 3238 - protein, 2046 aa, synthetic construct
  source 1..2046: note = Description of Artificial Sequence: Synthetic polypeptide
MPAAKRVKLDGGDKKYSIGLDIGTNSVGWAVITDEYKVPSKKFKVLGNTDRHSIKKNLIGALLFDSGETAEATRLKRTARRRYTRRKNRICYLQEIFSNEMAKVDDSFFHRLEESFLVEEDKKHERHPIFGNIVDEVAYHEKYPTIYHLRKKLVDSTDKADLRLIYLALAHMIKFRGHFLIEGDLNPDNSDVDKLFIQLVQTYNQLFEENPINASGVDAKAILSARLSKSRRLENLIAQLPGEKKNGLFGNLIALSLGLTPNFKSNFDLAEDAKLQLSKDTYDDDLDNLLAQIGDQYADLFLAAKNLSDAILLSDILRVNTEITKAPLSASMIKRYDEHHQDLTLLKALVRQQLPEKYKEIFFDQSKNGYAGYIDGGASQEEFYKFIKPILEKMDGTEELLVKLNREDLLRKQRTFDNGSIPHQIHLGELHAILRRQEDFYPFLKDNREKIEKILTFRIPYYVGPLARGNSRFAWMTRKSEETITPWNFEEVVDKGASAQSFIERMTNFDKNLPNEKVLPKHSLLYEYFTVYNELTKVKYVTEGMRKPAFLSGEQKKAIVDLLFKTNRKVTVKQLKEDYFKKIECFDSVEISGVEDRFNASLGTYHDLLKIIKDKDFLDNEENEDILEDIVLTLTLFEDREMIEERLKTYAHLFDDKVMKQLKRRRYTGWGRLSRKLINGIRDKQSGKTILDFLKSDGFANRNFMQLIHDDSLTFKEDIQKAQVSGQGDSLHEHIANLAGSPAIKKGILQTVKVVDELVKVMGRHKPENIVIEMARENQTTQKGQKNSRERMKRIEEGIKELGSQILKEHPVENTQLQNEKLYLYYLQNGRDMYVDQELDINRLSDYDVDHIVPQSFLKDDSIDNKVLTRSDKARGKSDNVPSEEVVKKMKNYWRQLLNAKLITQRKFDNLTKAERGGLSELDKAGFIKRQLVETRQITKHVAQILDSRMNTKYDENDKLIREVKVITLKSKLVSDFRKDFQFYKVREINNYHHAHDAYLNAVVGTALIKKYPKLESEFVYGDYKVYDVRKMIAKSEQEIGKATAKYFFYSNIMNFFKTEITLANGEIRKRPLIETNGETGEIVWDKGRDFATVRKVLSMPQVNIVKKTEVQTGGFSKESILPKRNSDKLIARKKDWDPKKYGGFDSPTVAYSVLVVAKVEKGKSKKLKSVKELLGITIMERSSFEKNPIDFLEAKGYKEVKKDLIIKLPKYSLFELENGRKRMLASAGELQKGNELALPSKYVNFLYLASHYEKLKGSPEDNEQKQLFVEQHKHYLDEIIEQISEFSKRVILADANLDKVLSAYNKHRDKPIREQAENIIHLFTLTNLGAPAAFKYFDTTIDRKRYTSTKEVLDATLIHQSITGLYETRIDLSQLGGDGGSGGSSGGSSGSETPGTSESATPESSGGSSGGSSGGGRDIMKDIKVRLMTDSPDDSQDLMIGAIESNLFADQISWKSDQPVWLNQWPLKQEKLQALQQLVTEQLQLGHLEESNSPWNTPVFVIKKKSGKWRLLQDLRAVNATMHDMGALQPGLPSPVAVPKGWEIIIIDLQDCFFNIKLHPEDCKRFAFSVPSPNFKRPYQRFQWKVLPQGMKNSPTLCQKFVDKAILTVRDKYQDSYIVHYMDDILLAHPSRSIVDEILTSMIQALNKHGLVVSTEKIQKYDNLKYLGTHIQGDSVSYQKLQIRTDKLRTLNDFQKLLGNINWIRPFLKLTTGELKPLFEILNGDSNPISTRKLTPEACKALQLMNERLSTARVKRLDLSQPWSLCILKTEYTPTACLWQDGVVEWIHLPHISPKVITPYDIFCTQLIIKGRHRSKELFSKDPDYIVVPYTKVQFDLLLQEKEDWPISLLGFLGEVHFHLPKDPLLTFTLQTAIIFPHMTSTTPLEKGIVIFTDGSANGRSVTYIQGREPIIKENTQNTAQQAEIVAVITAFEEVSQPFNLYTDSKYVTGLFPEIETATLSPRTKIYTELKHLQRLIHKRQEKFYIGHIRGHTGLPGPLAQGNAYADSLTRILTAGKRTADGSEFEKRTADGSEFESPKKKAKVE

SEQ ID NO: 3239 - protein, 2025 aa, synthetic construct
  source 1..2025: note = Description of Artificial Sequence: Synthetic polypeptide
MPAAKRVKLDGGDKKYSIGLDIGTNSVGWAVITDEYKVPSKKFKVLGNTDRHSIKKNLIGALLFDSGETAEATRLKRTARRRYTRRKNRICYLQEIFSNEMAKVDDSFFHRLEESFLVEEDKKHERHPIFGNIVDEVAYHEKYPTIYHLRKKLVDSTDKADLRLIYLALAHMIKFRGHFLIEGDLNPDNSDVDKLFIQLVQTYNQLFEENPINASGVDAKAILSARLSKSRRLENLIAQLPGEKKNGLFGNLIALSLGLTPNFKSNFDLAEDAKLQLSKDTYDDDLDNLLAQIGDQYADLFLAAKNLSDAILLSDILRVNTEITKAPLSASMIKRYDEHHQDLTLLKALVRQQLPEKYKEIFFDQSKNGYAGYIDGGASQEEFYKFIKPILEKMDGTEELLVKLNREDLLRKQRTFDNGSIPHQIHLGELHAILRRQEDFYPFLKDNREKIEKILTFRIPYYVGPLARGNSRFAWMTRKSEETITPWNFEEVVDKGASAQSFIERMTNFDKNLPNEKVLPKHSLLYEYFTVYNELTKVKYVTEGMRKPAFLSGEQKKAIVDLLFKTNRKVTVKQLKEDYFKKIECFDSVEISGVEDRFNASLGTYHDLLKIIKDKDFLDNEENEDILEDIVLTLTLFEDREMIEERLKTYAHLFDDKVMKQLKRRRYTGWGRLSRKLINGIRDKQSGKTILDFLKSDGFANRNFMQLIHDDSLTFKEDIQKAQVSGQGDSLHEHIANLAGSPAIKKGILQTVKVVDELVKVMGRHKPENIVIEMARENQTTQKGQKNSRERMKRIEEGIKELGSQILKEHPVENTQLQNEKLYLYYLQNGRDMYVDQELDINRLSDYDVDHIVPQSFLKDDSIDNKVLTRSDKARGKSDNVPSEEVVKKMKNYWRQLLNAKLITQRKFDNLTKAERGGLSELDKAGFIKRQLVETRQITKHVAQILDSRMNTKYDENDKLIREVKVITLKSKLVSDFRKDFQFYKVREINNYHHAHDAYLNAVVGTALIKKYPKLESEFVYGDYKVYDVRKMIAKSEQEIGKATAKYFFYSNIMNFFKTEITLANGEIRKRPLIETNGETGEIVWDKGRDFATVRKVLSMPQVNIVKKTEVQTGGFSKESILPKRNSDKLIARKKDWDPKKYGGFDSPTVAYSVLVVAKVEKGKSKKLKSVKELLGITIMERSSFEKNPIDFLEAKGYKEVKKDLIIKLPKYSLFELENGRKRMLASAGELQKGNELALPSKYVNFLYLASHYEKLKGSPEDNEQKQLFVEQHKHYLDEIIEQISEFSKRVILADANLDKVLSAYNKHRDKPIREQAENIIHLFTLTNLGAPAAFKYFDTTIDRKRYTSTKEVLDATLIHQSITGLYETRIDLSQLGGDGGGSSGSSGSSGSSGGGRDIMKDIKVRLMTDSPDDSQDLMIGAIESNLFADQISWKSDQPVWLNQWPLKQEKLQALQQLVTEQLQLGHLEESNSPWNTPVFVIKKKSGKWRLLQDLRAVNATMHDMGALQPGLPSPVAVPKGWEIIIIDLQDCFFNIKLHPEDCKRFAFSVPSPNFKRPYQRFQWKVLPQGMKNSPTLCQKFVDKAILTVRDKYQDSYIVHYMDDILLAHPSRSIVDEILTSMIQALNKHGLVVSTEKIQKYDNLKYLGTHIQGDSVSYQKLQIRTDKLRTLNDFQKLLGNINWIRPFLKLTTGELKPLFEILNGDSNPISTRKLTPEACKALQLMNERLSTARVKRLDLSQPWSLCILKTEYTPTACLWQDGVVEWIHLPHISPKVITPYDIFCTQLIIKGRHRSKELFSKDPDYIVVPYTKVQFDLLLQEKEDWPISLLGFLGEVHFHLPKDPLLTFTLQTAIIFPHMTSTTPLEKGIVIFTDGSANGRSVTYIQGREPIIKENTQNTAQQAEIVAVITAFEEVSQPFNLYTDSKYVTGLFPEIETATLSPRTKIYTELKHLQRLIHKRQEKFYIGHIRGHTGLPGPLAQGNAYADSLTRILTAGKRTADGSEFEKRTADGSEFESPKKKAKVE

SEQ ID NO: 3240 - protein, 2022 aa, synthetic construct
  source 1..2022: note = Description of Artificial Sequence: Synthetic polypeptide
MPAAKRVKLDGGDKKYSIGLDIGTNSVGWAVITDEYKVPSKKFKVLGNTDRHSIKKNLIGALLFDSGETAEATRLKRTARRRYTRRKNRICYLQEIFSNEMAKVDDSFFHRLEESFLVEEDKKHERHPIFGNIVDEVAYHEKYPTIYHLRKKLVDSTDKADLRLIYLALAHMIKFRGHFLIEGDLNPDNSDVDKLFIQLVQTYNQLFEENPINASGVDAKAILSARLSKSRRLENLIAQLPGEKKNGLFGNLIALSLGLTPNFKSNFDLAEDAKLQLSKDTYDDDLDNLLAQIGDQYADLFLAAKNLSDAILLSDILRVNTEITKAPLSASMIKRYDEHHQDLTLLKALVRQQLPEKYKEIFFDQSKNGYAGYIDGGASQEEFYKFIKPILEKMDGTEELLVKLNREDLLRKQRTFDNGSIPHQIHLGELHAILRRQEDFYPFLKDNREKIEKILTFRIPYYVGPLARGNSRFAWMTRKSEETITPWNFEEVVDKGASAQSFIERMTNFDKNLPNEKVLPKHSLLYEYFTVYNELTKVKYVTEGMRKPAFLSGEQKKAIVDLLFKTNRKVTVKQLKEDYFKKIECFDSVEISGVEDRFNASLGTYHDLLKIIKDKDFLDNEENEDILEDIVLTLTLFEDREMIEERLKTYAHLFDDKVMKQLKRRRYTGWGRLSRKLINGIRDKQSGKTILDFLKSDGFANRNFMQLIHDDSLTFKEDIQKAQVSGQGDSLHEHIANLAGSPAIKKGILQTVKVVDELVKVMGRHKPENIVIEMARENQTTQKGQKNSRERMKRIEEGIKELGSQILKEHPVENTQLQNEKLYLYYLQNGRDMYVDQELDINRLSDYDVDHIVPQSFLKDDSIDNKVLTRSDKARGKSDNVPSEEVVKKMKNYWRQLLNAKLITQRKFDNLTKAERGGLSELDKAGFIKRQLVETRQITKHVAQILDSRMNTKYDENDKLIREVKVITLKSKLVSDFRKDFQFYKVREINNYHHAHDAYLNAVVGTALIKKYPKLESEFVYGDYKVYDVRKMIAKSEQEIGKATAKYFFYSNIMNFFKTEITLANGEIRKRPLIETNGETGEIVWDKGRDFATVRKVLSMPQVNIVKKTEVQTGGFSKESILPKRNSDKLIARKKDWDPKKYGGFDSPTVAYSVLVVAKVEKGKSKKLKSVKELLGITIMERSSFEKNPIDFLEAKGYKEVKKDLIIKLPKYSLFELENGRKRMLASAGELQKGNELALPSKYVNFLYLASHYEKLKGSPEDNEQKQLFVEQHKHYLDEIIEQISEFSKRVILADANLDKVLSAYNKHRDKPIREQAENIIHLFTLTNLGAPAAFKYFDTTIDRKRYTSTKEVLDATLIHQSITGLYETRIDLSQLGGDGGGGGGGSGSSGGGRDIMKDIKVRLMTDSPDDSQDLMIGAIESNLFADQISWKSDQPVWLNQWPLKQEKLQALQQLVTEQLQLGHLEESNSPWNTPVFVIKKKSGKWRLLQDLRAVNATMHDMGALQPGLPSPVAVPKGWEIIIIDLQDCFFNIKLHPEDCKRFAFSVPSPNFKRPYQRFQWKVLPQGMKNSPTLCQKFVDKAILTVRDKYQDSYIVHYMDDILLAHPSRSIVDEILTSMIQALNKHGLVVSTEKIQKYDNLKYLGTHIQGDSVSYQKLQIRTDKLRTLNDFQKLLGNINWIRPFLKLTTGELKPLFEILNGDSNPISTRKLTPEACKALQLMNERLSTARVKRLDLSQPWSLCILKTEYTPTACLWQDGVVEWIHLPHISPKVITPYDIFCTQLIIKGRHRSKELFSKDPDYIVVPYTKVQFDLLLQEKEDWPISLLGFLGEVHFHLPKDPLLTFTLQTAIIFPHMTSTTPLEKGIVIFTDGSANGRSVTYIQGREPIIKENTQNTAQQAEIVAVITAFEEVSQPFNLYTDSKYVTGLFPEIETATLSPRTKIYTELKHLQRLIHKRQEKFYIGHIRGHTGLPGPLAQGNAYADSLTRILTAGKRTADGSEFEKRTADGSEFESPKKKAKVE

SEQ ID NO: 3241 - protein, 2022 aa, synthetic construct
  source 1..2022: note = Description of Artificial Sequence: Synthetic polypeptide
MPAAKRVKLDGGDKKYSIGLDIGTNSVGWAVITDEYKVPSKKFKVLGNTDRHSIKKNLIGALLFDSGETAEATRLKRTARRRYTRRKNRICYLQEIFSNEMAKVDDSFFHRLEESFLVEEDKKHERHPIFGNIVDEVAYHEKYPTIYHLRKKLVDSTDKADLRLIYLALAHMIKFRGHFLIEGDLNPDNSDVDKLFIQLVQTYNQLFEENPINASGVDAKAILSARLSKSRRLENLIAQLPGEKKNGLFGNLIALSLGLTPNFKSNFDLAEDAKLQLSKDTYDDDLDNLLAQIGDQYADLFLAAKNLSDAILLSDILRVNTEITKAPLSASMIKRYDEHHQDLTLLKALVRQQLPEKYKEIFFDQSKNGYAGYIDGGASQEEFYKFIKPILEKMDGTEELLVKLNREDLLRKQRTFDNGSIPHQIHLGELHAILRRQEDFYPFLKDNREKIEKILTFRIPYYVGPLARGNSRFAWMTRKSEETITPWNFEEVVDKGASAQSFIERMTNFDKNLPNEKVLPKHSLLYEYFTVYNELTKVKYVTEGMRKPAFLSGEQKKAIVDLLFKTNRKVTVKQLKEDYFKKIECFDSVEISGVEDRFNASLGTYHDLLKIIKDKDFLDNEENEDILEDIVLTLTLFEDREMIEERLKTYAHLFDDKVMKQLKRRRYTGWGRLSRKLINGIRDKQSGKTILDFLKSDGFANRNFMQLIHDDSLTFKEDIQKAQVSGQGDSLHEHIANLAGSPAIKKGILQTVKVVDELVKVMGRHKPENIVIEMARENQTTQKGQKNSRERMKRIEEGIKELGSQILKEHPVENTQLQNEKLYLYYLQNGRDMYVDQELDINRLSDYDVDHIVPQSFLKDDSIDNKVLTRSDKARGKSDNVPSEEVVKKMKNYWRQLLNAKLITQRKFDNLTKAERGGLSELDKAGFIKRQLVETRQITKHVAQILDSRMNTKYDENDKLIREVKVITLKSKLVSDFRKDFQFYKVREINNYHHAHDAYLNAVVGTALIKKYPKLESEFVYGDYKVYDVRKMIAKSEQEIGKATAKYFFYSNIMNFFKTEITLANGEIRKRPLIETNGETGEIVWDKGRDFATVRKVLSMPQVNIVKKTEVQTGGFSKESILPKRNSDKLIARKKDWDPKKYGGFDSPTVAYSVLVVAKVEKGKSKKLKSVKELLGITIMERSSFEKNPIDFLEAKGYKEVKKDLIIKLPKYSLFELENGRKRMLASAGELQKGNELALPSKYVNFLYLASHYEKLKGSPEDNEQKQLFVEQHKHYLDEIIEQISEFSKRVILADANLDKVLSAYNKHRDKPIREQAENIIHLFTLTNLGAPAAFKYFDTTIDRKRYTSTKEVLDATLIHQSITGLYETRIDLSQLGGDGGGGGGSSGGSGGGRDIMKDIKVRLMTDSPDDSQDLMIGAIESNLFADQISWKSDQPVWLNQWPLKQEKLQALQQLVTEQLQLGHLEESNSPWNTPVFVIKKKSGKWRLLQDLRAVNATMHDMGALQPGLPSPVAVPKGWEIIIIDLQDCFFNIKLHPEDCKRFAFSVPSPNFKRPYQRFQWKVLPQGMKNSPTLCQKFVDKAILTVRDKYQDSYIVHYMDDILLAHPSRSIVDEILTSMIQALNKHGLVVSTEKIQKYDNLKYLGTHIQGDSVSYQKLQIRTDKLRTLNDFQKLLGNINWIRPFLKLTTGELKPLFEILNGDSNPISTRKLTPEACKALQLMNERLSTARVKRLDLSQPWSLCILKTEYTPTACLWQDGVVEWIHLPHISPKVITPYDIFCTQLIIKGRHRSKELFSKDPDYIVVPYTKVQFDLLLQEKEDWPISLLGFLGEVHFHLPKDPLLTFTLQTAIIFPHMTSTTPLEKGIVIFTDGSANGRSVTYIQGREPIIKENTQNTAQQAEIVAVITAFEEVSQPFNLYTDSKYVTGLFPEIETATLSPRTKIYTELKHLQRLIHKRQEKFYIGHIRGHTGLPGPLAQGNAYADSLTRILTAGKRTADGSEFEKRTADGSEFESPKKKAKVE

SEQ ID NO: 3242 - protein, 2019 aa, synthetic construct
  source 1..2019: note = Description of Artificial Sequence: Synthetic polypeptide
MPAAKRVKLDGGDKKYSIGLDIGTNSVGWAVITDEYKVPSKKFKVLGNTDRHSIKKNLIGALLFDSGETAEATRLKRTARRRYTRRKNRICYLQEIFSNEMAKVDDSFFHRLEESFLVEEDKKHERHPIFGNIVDEVAYHEKYPTIYHLRKKLVDSTDKADLRLIYLALAHMIKFRGHFLIEGDLNPDNSDVDKLFIQLVQTYNQLFEENPINASGVDAKAILSARLSKSRRLENLIAQLPGEKKNGLFGNLIALSLGLTPNFKSNFDLAEDAKLQLSKDTYDDDLDNLLAQIGDQYADLFLAAKNLSDAILLSDILRVNTEITKAPLSASMIKRYDEHHQDLTLLKALVRQQLPEKYKEIFFDQSKNGYAGYIDGGASQEEFYKFIKPILEKMDGTEELLVKLNREDLLRKQRTFDNGSIPHQIHLGELHAILRRQEDFYPFLKDNREKIEKILTFRIPYYVGPLARGNSRFAWMTRKSEETITPWNFEEVVDKGASAQSFIERMTNFDKNLPNEKVLPKHSLLYEYFTVYNELTKVKYVTEGMRKPAFLSGEQKKAIVDLLFKTNRKVTVKQLKEDYFKKIECFDSVEISGVEDRFNASLGTYHDLLKIIKDKDFLDNEENEDILEDIVLTLTLFEDREMIEERLKTYAHLFDDKVMKQLKRRRYTGWGRLSRKLINGIRDKQSGKTILDFLKSDGFANRNFMQLIHDDSLTFKEDIQKAQVSGQGDSLHEHIANLAGSPAIKKGILQTVKVVDELVKVMGRHKPENIVIEMARENQTTQKGQKNSRERMKRIEEGIKELGSQILKEHPVENTQLQNEKLYLYYLQNGRDMYVDQELDINRLSDYDVDHIVPQSFLKDDSIDNKVLTRSDKARGKSDNVPSEEVVKKMKNYWRQLLNAKLITQRKFDNLTKAERGGLSELDKAGFIKRQLVETRQITKHVAQILDSRMNTKYDENDKLIREVKVITLKSKLVSDFRKDFQFYKVREINNYHHAHDAYLNAVVGTALIKKYPKLESEFVYGDYKVYDVRKMIAKSEQEIGKATAKYFFYSNIMNFFKTEITLANGEIRKRPLIETNGETGEIVWDKGRDFATVRKVLSMPQVNIVKKTEVQTGGFSKESILPKRNSDKLIARKKDWDPKKYGGFDSPTVAYSVLVVAKVEKGKSKKLKSVKELLGITIMERSSFEKNPIDFLEAKGYKEVKKDLIIKLPKYSLFELENGRKRMLASAGELQKGNELALPSKYVNFLYLASHYEKLKGSPEDNEQKQLFVEQHKHYLDEIIEQISEFSKRVILADANLDKVLSAYNKHRDKPIREQAENIIHLFTLTNLGAPAAFKYFDTTIDRKRYTSTKEVLDATLIHQSITGLYETRIDLSQLGGDGGGGSGSSGGGRDIMKDIKVRLMTDSPDDSQDLMIGAIESNLFADQISWKSDQPVWLNQWPLKQEKLQALQQLVTEQLQLGHLEESNSPWNTPVFVIKKKSGKWRLLQDLRAVNATMHDMGALQPGLPSPVAVPKGWEIIIIDLQDCFFNIKLHPEDCKRFAFSVPSPNFKRPYQRFQWKVLPQGMKNSPTLCQKFVDKAILTVRDKYQDSYIVHYMDDILLAHPSRSIVDEILTSMIQALNKHGLVVSTEKIQKYDNLKYLGTHIQGDSVSYQKLQIRTDKLRTLNDFQKLLGNINWIRPFLKLTTGELKPLFEILNPDSNPISTRKLTPEACKALQLMNERLSTARVKRLDLSQPWSLCILKTEYTPTACLWQDGVVEWIHLPHISPKVITPYDIFCTQLIIKGRHRSKELFSKDPDYIVVPYTKVQFDLLLQEKEDWPISLLGFLGEVHFHLPKDPLLTFTLQTAIIFPHMTSTTPLEKGIVIFTDGSANGRSVTYIQGREPIIKENTQNTAQQAEIVAVITAFEEVSQPFNLYTDSKYVTGLFPEIETATLSPRTKIYTELKHLQRLIHKRQEKFYIGHIRGHTGLPGPLAQGNAYADSLTRILTAGKRTADGSEFEKRTADGSEFESPKKKAKVE

SEQ ID NO: 3243 - protein, 2022 aa, synthetic construct
  source 1..2022: note = Description of Artificial Sequence: Synthetic polypeptide
MPAAKRVKLDGGDKKYSIGLDIGTNSVGWAVITDEYKVPSKKFKVLGNTDRHSIKKNLIGALLFDSGETAEATRLKRTARRRYTRRKNRICYLQEIFSNEMAKVDDSFFHRLEESFLVEEDKKHERHPIFGNIVDEVAYHEKYPTIYHLRKKLVDSTDKADLRLIYLALAHMIKFRGHFLIEGDLNPDNSDVDKLFIQLVQTYNQLFEENPINASGVDAKAILSARLSKSRRLENLIAQLPGEKKNGLFGNLIALSLGLTPNFKSNFDLAEDAKLQLSKDTYDDDLDNLLAQIGDQYADLFLAAKNLSDAILLSDILRVNTEITKAPLSASMIKRYDEHHQDLTLLKALVRQQLPEKYKEIFFDQSKNGYAGYIDGGASQEEFYKFIKPILEKMDGTEELLVKLNREDLLRKQRTFDNGSIPHQIHLGELHAILRRQEDFYPFLKDNREKIEKILTFRIPYYVGPLARGNSRFAWMTRKSEETITPWNFEEVVDKGASAQSFIERMTNFDKNLPNEKVLPKHSLLYEYFTVYNELTKVKYVTEGMRKPAFLSGEQKKAIVDLLFKTNRKVTVKQLKEDYFKKIECFDSVEISGVEDRFNASLGTYHDLLKIIKDKDFLDNEENEDILEDIVLTLTLFEDREMIEERLKTYAHLFDDKVMKQLKRRRYTGWGRLSRKLINGIRDKQSGKTILDFLKSDGFANRNFMQLIHDDSLTFKEDIQKAQVSGQGDSLHEHIANLAGSPAIKKGILQTVKVVDELVKVMGRHKPENIVIEMARENQTTQKGQKNSRERMKRIEEGIKELGSQILKEHPVENTQLQNEKLYLYYLQNGRDMYVDQELDINRLSDYDVDHIVPQSFLKDDSIDNKVLTRSDKARGKSDNVPSEEVVKKMKNYWRQLLNAKLITQRKFDNLTKAERGGLSELDKAGFIKRQLVETRQITKHVAQILDSRMNTKYDENDKLIREVKVITLKSKLVSDFRKDFQFYKVREINNYHHAHDAYLNAVVGTALIKKYPKLESEFVYGDYKVYDVRKMIAKSEQEIGKATAKYFFYSNIMNFFKTEITLANGEIRKRPLIETNGETGEIVWDKGRDFATVRKVLSMPQVNIVKKTEVQTGGFSKESILPKRNSDKLIARKKDWDPKKYGGFDSPTVAYSVLVVAKVEKGKSKKLKSVKELLGITIMERSSFEKNPIDFLEAKGYKEVKKDLIIKLPKYSLFELENGRKRMLASAGELQKGNELALPSKYVNFLYLASHYEKLKGSPEDNEQKQLFVEQHKHYLDEIIEQISEFSKRVILADANLDKVLSAYNKHRDKPIREQAENIIHLFTLTNLGAPAAFKYFDTTIDRKRYTSTKEVLDATLIHQSITGLYETRIDLSQLGGDGGGGGGGSGSSGGGRDIMKDIKVRLMTDSPDDSQDLMIGAIESNLFADQISWKSDQPVWLNQWPLKQEKLQALQQLVTEQLQLGHLEESNSPWNTPVFVIKKKSGKWRLLQDLRAVNATMHDMGALQPGLPSPVAVPKGWEIIIIDLQDCFFNIKLHPEDCKRFAFSVPSPNFKRPYQRFQWKVLPQGMKNSPTLCQKFVDKAILTVRDKYQDSYIVHYMDDILLAHPSRSIVDEILTSMIQALNKHGLVVSTEKIQKYDNLKYLGTHIQGDSVSYQKLQIRTDKLRTLNDFQKLLGNINWIRPFLKLTTGELKPLFEILNPDSNPISTRKLTPEACKALQLMNERLSTARVKRLDLSQPWSLCILKTEYTPTACLWQDGVVEWIHLPHISPKVITPYDIFCTQLIIKGRHRSKELFSKDPDYIVVPYTKVQFDLLLQEKEDWPISLLGFLGEVHFHLPKDPLLTFTLQTAIIFPHMTSTTPLEKGIVIFTDGSANGRSVTYIQGREPIIKENTQNTAQQAEIVAVITAFEEVSQPFNLYTDSKYVTGLFPEIETATLSPRTKIYTELKHLQRLIHKRQEKFYIGHIRGHTGLPGPLAQGNAYADSLTRILTAGKRTADGSEFEKRTADGSEFESPKKKAKVE

SEQ ID NO: 3244 - protein, 2024 aa, synthetic construct
  source 1..2024: note = Description of Artificial Sequence: Synthetic polypeptide
MPAAKRVKLDGGDKKYSIGLDIGTNSVGWAVITDEYKVPSKKFKVLGNTDRHSIKKNLIGALLFDSGETAEATRLKRTARRRYTRRKNRICYLQEIFSNEMAKVDDSFFHRLEESFLVEEDKKHERHPIFGNIVDEVAYHEKYPTIYHLRKKLVDSTDKADLRLIYLALAHMIKFRGHFLIEGDLNPDNSDVDKLFIQLVQTYNQLFEENPINASGVDAKAILSARLSKSRRLENLIAQLPGEKKNGLFGNLIALSLGLTPNFKSNFDLAEDAKLQLSKDTYDDDLDNLLAQIGDQYADLFLAAKNLSDAILLSDILRVNTEITKAPLSASMIKRYDEHHQDLTLLKALVRQQLPEKYKEIFFDQSKNGYAGYIDGGASQEEFYKFIKPILEKMDGTEELLVKLNREDLLRKQRTFDNGSIPHQIHLGELHAILRRQEDFYPFLKDNREKIEKILTFRIPYYVGPLARGNSRFAWMTRKSEETITPWNFEEVVDKGASAQSFIERMTNFDKNLPNEKVLPKHSLLYEYFTVYNELTKVKYVTEGMRKPAFLSGEQKKAIVDLLFKTNRKVTVKQLKEDYFKKIECFDSVEISGVEDRFNASLGTYHDLLKIIKDKDFLDNEENEDILEDIVLTLTLFEDREMIEERLKTYAHLFDDKVMKQLKRRRYTGWGRLSRKLINGIRDKQSGKTILDFLKSDGFANRNFMQLIHDDSLTFKEDIQKAQVSGQGDSLHEHIANLAGSPAIKKGILQTVKVVDELVKVMGRHKPENIVIEMARENQTTQKGQKNSRERMKRIEEGIKELGSQILKEHPVENTQLQNEKLYLYYLQNGRDMYVDQELDINRLSDYDVDHIVPQSFLKDDSIDNKVLTRSDKARGKSDNVPSEEVVKKMKNYWRQLLNAKLITQRKFDNLTKAERGGLSELDKAGFIKRQLVETRQITKHVAQILDSRMNTKYDENDKLIREVKVITLKSKLVSDFRKDFQFYKVREINNYHHAHDAYLNAVVGTALIKKYPKLESEFVYGDYKVYDVRKMIAKSEQEIGKATAKYFFYSNIMNFFKTEITLANGEIRKRPLIETNGETGEIVWDKGRDFATVRKVLSMPQVNIVKKTEVQTGGFSKESILPKRNSDKLIARKKDWDPKKYGGFDSPTVAYSVLVVAKVEKGKSKKLKSVKELLGITIMERSSFEKNPIDFLEAKGYKEVKKDLIIKLPKYSLFELENGRKRMLASAGELQKGNELALPSKYVNFLYLASHYEKLKGSPEDNEQKQLFVEQHKHYLDEIIEQISEFSKRVILADANLDKVLSAYNKHRDKPIREQAENIIHLFTLTNLGAPAAFKYFDTTIDRKRYTSTKEVLDATLIHQSITGLYETRIDLSQLGGDGGGSSEAAAKGGSGGGRDIMKDIKVRLMTDSPDDSQDLMIGAIESNLFADQISWKSDQPVWLNQWPLKQEKLQALQQLVTEQLQLGHLEESNSPWNTPVFVIKKKSGKWRLLQDLRAVNATMHDMGALQPGLPSPVAPPKGWEIIIIDLQDCFFNIKLHPEDCKRFAFSVPSPNFKRPYQRFQWKVLPQGMKNSPTLCQKFVDKAILTVRDKYQDSYIVHYMDDILLAHPSRSIVDEILTSMIQALNKHGLVVSTEKIQKYDNLKYLGTHIQGDSVSYQKLQIRTDKLRTLNDFQKLLGNINWIRPFLKLTTGELKPLFEILNPDSNPISTRKLTPEACKALQLMNERLSTARVKRLDLSQPWSLCILKTEYTPTACLWQDGVVEWIHLPHISPKVITPYDIFCTQLIIKGRHRSKELFSKDPDYIVVPYTKVQFDLLLQEKEDWPISLLGFLGEVHFHLPKDPLLTFTLQTAIIFPHMTSTTPLEKGIVIFTDGSANGRSVTYIQGREPIIKENTQNTAQQAEIVAVITAFEEVSQPFNLYTDSKYVTGLFPEIETATLSPRTKIYTELKHLQRLIHKRQEKFYIGHIRGHTGLPGPLAQGNAYADSLTRILTAGKRTADGSEFEKRTADGSEFESPKKKAKVE

SEQ ID NO: 3245 - protein, 2125 aa, synthetic construct
  source 1..2125: note = Description of Artificial Sequence: Synthetic polypeptide
MPAAKRVKLDGGDKKYSIGLDIGTNSVGWAVITDEYKVPSKKFKVLGNTDRHSIKKNLIGALLFDSGETAEATRLKRTARRRYTRRKNRICYLQEIFSNEMAKVDDSFFHRLEESFLVEEDKKHERHPIFGNIVDEVAYHEKYPTIYHLRKKLVDSTDKADLRLIYLALAHMIKFRGHFLIEGDLNPDNSDVDKLFIQLVQTYNQLFEENPINASGVDAKAILSARLSKSRRLENLIAQLPGEKKNGLFGNLIALSLGLTPNFKSNFDLAEDAKLQLSKDTYDDDLDNLLAQIGDQYADLFLAAKNLSDAILLSDILRVNTEITKAPLSASMIKRYDEHHQDLTLLKALVRQQLPEKYKEIFFDQSKNGYAGYIDGGASQEEFYKFIKPILEKMDGTEELLVKLNREDLLRKQRTFDNGSIPHQIHLGELHAILRRQEDFYPFLKDNREKIEKILTFRIPYYVGPLARGNSRFAWMTRKSEETITPWNFEEVVDKGASAQSFIERMTNFDKNLPNEKVLPKHSLLYEYFTVYNELTKVKYVTEGMRKPAFLSGEQKKAIVDLLFKTNRKVTVKQLKEDYFKKIECFDSVEISGVEDRFNASLGTYHDLLKIIKDKDFLDNEENEDILEDIVLTLTLFEDREMIEERLKTYAHLFDDKVMKQLKRRRYTGWGRLSRKLINGIRDKQSGKTILDFLKSDGFANRNFMQLIHDDSLTFKEDIQKAQVSGQGDSLHEHIANLAGSPAIKKGILQTVKVVDELVKVMGRHKPENIVIEMARENQTTQKGQKNSRERMKRIEEGIKELGSQILKEHPVENTQLQNEKLYLYYLQNGRDMYVDQELDINRLSDYDVDHIVPQSFLKDDSIDNKVLTRSDKARGKSDNVPSEEVVKKMKNYWRQLLNAKLITQRKFDNLTKAERGGLSELDKAGFIKRQLVETRQITKHVAQILDSRMNTKYDENDKLIREVKVITLKSKLVSDFRKDFQFYKVREINNYHHAHDAYLNAVVGTALIKKYPKLESEFVYGDYKVYDVRKMIAKSEQEIGKATAKYFFYSNIMNFFKTEITLANGEIRKRPLIETNGETGEIVWDKGRDFATVRKVLSMPQVNIVKKTEVQTGGFSKESILPKRNSDKLIARKKDWDPKKYGGFDSPTVAYSVLVVAKVEKGKSKKLKSVKELLGITIMERSSFEKNPIDFLEAKGYKEVKKDLIIKLPKYSLFELENGRKRMLASAGELQKGNELALPSKYVNFLYLASHYEKLKGSPEDNEQKQLFVEQHKHYLDEIIEQISEFSKRVILADANLDKVLSAYNKHRDKPIREQAENIIHLFTLTNLGAPAAFKYFDTTIDRKRYTSTKEVLDATLIHQSITGLYETRIDLSQLGGDGGEAAAKEAAAKEAAAKEAAAKGGWVQEISDSRPMLHIYLNGRRFLGLLNTGADKTCIAGRDWPANWPIHQTESSLQGLGMACGVARSSQPLRWQHEDKSGIIHPFVIPTLPFTLWGRDIMKDIKVRLMTDSPDDSQDLMIGAIESNLFADQISWKSDQPVWLNQWPLKQEKLQALQQLVTEQLQLGHLEESNSPWNTPVFVIKKKSGKWRLLQDLRAVNATMHDMGALQPGLPSPVAVPKGWEIIIIDLQDCFFNIKLHPEDCKRFAFSVPSPNFKRPYQRFQWKVLPQGMKNSPTLCQKFVDKAILTVRDKYQDSYIVHYMDDILLAHPSRSIVDEILTSMIQALNKHGLVVSTEKIQKYDNLKYLGTHIQGDSVSYQKLQIRTDKLRTLNDFQKLLGNINWIRPFLKLTTGELKPLFEILNPDSNPISTRKLTPEACKALQLMNERLSTARVKRLDLSQPWSLCILKTEYTPTACLWQDGVVEWIHLPHISPKVITPYDIFCTQLIIKGRHRSKELFSKDPDYIVVPYTKVQFDLLLQEKEDWPISLLGFLGEVHFHLPKDPLLTFTLQTAIIFPHMTSTTPLEKGIVIFTDGSANGRSVTYIQGREPIIKENTQNTAQQAEIVAVITAFEEVSQPFNLYTDSKYVTGLFPEIETATLSPRTKIYTELKHLQRLIHKRQEKFYIGHIRGHTGLPGPLAQGNAYADSLTRILTAGKRTADGSEFEKRTADGSEFESPKKKAKVE

SEQ ID NO: 3246 - protein, 2116 aa, synthetic construct
  source 1..2116: note = Description of Artificial Sequence: Synthetic polypeptide
MPAAKRVKLDGGDKKYSIGLDIGTNSVGWAVITDEYKVPSKKFKVLGNTDRHSIKKNLIGALLFDSGETAEATRLKRTARRRYTRRKNRICYLQEIFSNEMAKVDDSFFHRLEESFLVEEDKKHERHPIFGNIVDEVAYHEKYPTIYHLRKKLVDSTDKADLRLIYLALAHMIKFRGHFLIEGDLNPDNSDVDKLFIQLVQTYNQLFEENPINASGVDAKAILSARLSKSRRLENLIAQLPGEKKNGLFGNLIALSLGLTPNFKSNFDLAEDAKLQLSKDTYDDDLDNLLAQIGDQYADLFLAAKNLSDAILLSDILRVNTEITKAPLSASMIKRYDEHHQDLTLLKALVRQQLPEKYKEIFFDQSKNGYAGYIDGGASQEEFYKFIKPILEKMDGTEELLVKLNREDLLRKQRTFDNGSIPHQIHLGELHAILRRQEDFYPFLKDNREKIEKILTFRIPYYVGPLARGNSRFAWMTRKSEETITPWNFEEVVDKGASAQSFIERMTNFDKNLPNEKVLPKHSLLYEYFTVYNELTKVKYVTEGMRKPAFLSGEQKKAIVDLLFKTNRKVTVKQLKEDYFKKIECFDSVEISGVEDRFNASLGTYHDLLKIIKDKDFLDNEENEDILEDIVLTLTLFEDREMIEERLKTYAHLFDDKVMKQLKRRRYTGWGRLSRKLINGIRDKQSGKTILDFLKSDGFANRNFMQLIHDDSLTFKEDIQKAQVSGQGDSLHEHIANLAGSPAIKKGILQTVKVVDELVKVMGRHKPENIVIEMARENQTTQKGQKNSRERMKRIEEGIKELGSQILKEHPVENTQLQNEKLYLYYLQNGRDMYVDQELDINRLSDYDVDHIVPQSFLKDDSIDNKVLTRSDKARGKSDNVPSEEVVKKMKNYWRQLLNAKLITQRKFDNLTKAERGGLSELDKAGFIKRQLVETRQITKHVAQILDSRMNTKYDENDKLIREVKVITLKSKLVSDFRKDFQFYKVREINNYHHAHDAYLNAVVGTALIKKYPKLESEFVYGDYKVYDVRKMIAKSEQEIGKATAKYFFYSNIMNFFKTEITLANGEIRKRPLIETNGETGEIVWDKGRDFATVRKVLSMPQVNIVKKTEVQTGGFSKESILPKRNSDKLIARKKDWDPKKYGGFDSPTVAYSVLVVAKVEKGKSKKLKSVKELLGITIMERSSFEKNPIDFLEAKGYKEVKKDLIIKLPKYSLFELENGRKRMLASAGELQKGNELALPSKYVNFLYLASHYEKLKGSPEDNEQKQLFVEQHKHYLDEIIEQISEFSKRVILADANLDKVLSAYNKHRDKPIREQAENIIHLFTLTNLGAPAAFKYFDTTIDRKRYTSTKEVLDATLIHQSITGLYETRIDLSQLGGDGGGSSGGSEAAAKGGWVQEISDSRPMLHIYLNGRRFLGLLNTGADKTCIAGRDWPANWPIHQTESSLQGLGMACGVARSSQPLRWQHEDKSGIIHPFVIPTLPFTLWGRDIMKDIKVRLMTDSPDDSQDLMIGAIESNLFADQISWKSDQPVWLNQWPLKQEKLQALQQLVTEQLQLGHLEESNSPWNTPVFVIKKKSGKWRLLQDLRAVNATMHDMGALQPGLPSPVAVPKGWEIIIIDLQDCFFNIKLHPEDCKRFAFSVPSPNFKRPYQRFQWKVLPQGMKNSPTLCQKFVDKAILTVRDKYQDSYIVHYMDDILLAHPSRSIVDEILTSMIQALNKHGLVVSTEKIQKYDNLKYLGTHIQGDSVSYQKLQIRTDKLRTLNDFQKLLGNINWIRPFLKLTTGELKPLFEILNPDSNPISTRKLTPEACKALQLMNERLSTARVKRLDLSQPWSLCILKTEYTPTACLWQDGVVEWIHLPHISPKVITPYDIFCTQLIIKGRHRSKELFSKDPDYIVVPYTKVQFDLLLQEKEDWPISLLGFLGEVHFHLPKDPLLTFTLQTAIIFPHMTSTTPLEKGIVIFTDGSANGRSVTYIQGREPIIKENTQNTAQQAEIVAVITAFEEVSQPFNLYTDSKYVTGLFPEIETATLSPRTKIYTELKHLQRLIHKRQEKFYIGHIRGHTGLPGPLAQGNAYADSLTRILTAGKRTADGSEFEKRTADGSEFESPKKKAKVE

SEQ ID NO: 3247 - protein, 2114 aa, synthetic construct
  source 1..2114: note = Description of Artificial Sequence: Synthetic polypeptide
MPAAKRVKLDGGDKKYSIGLDIGTNSVGWAVITDEYKVPSKKFKVLGNTDRHSIKKNLIGALLFDSGETAEATRLKRTARRRYTRRKNRICYLQEIFSNEMAKVDDSFFHRLEESFLVEEDKKHERHPIFGNIVDEVAYHEKYPTIYHLRKKLVDSTDKADLRLIYLALAHMIKFRGHFLIEGDLNPDNSDVDKLFIQLVQTYNQLFEENPINASGVDAKAILSARLSKSRRLENLIAQLPGEKKNGLFGNLIALSLGLTPNFKSNFDLAEDAKLQLSKDTYDDDLDNLLAQIGDQYADLFLAAKNLSDAILLSDILRVNTEITKAPLSASMIKRYDEHHQDLTLLKALVRQQLPEKYKEIFFDQSKNGYAGYIDGGASQEEFYKFIKPILEKMDGTEELLVKLNREDLLRKQRTFDNGSIPHQIHLGELHAILRRQEDFYPFLKDNREKIEKILTFRIPYYVGPLARGNSRFAWMTRKSEETITPWNFEEVVDKGASAQSFIERMTNFDKNLPNEKVLPKHSLLYEYFTVYNELTKVKYVTEGMRKPAFLSGEQKKAIVDLLFKTNRKVTVKQLKEDYFKKIECFDSVEISGVEDRFNASLGTYHDLLKIIKDKDFLDNEENEDILEDIVLTLTLFEDREMIEERLKTYAHLFDDKVMKQLKRRRYTGWGRLSRKLINGIRDKQSGKTILDFLKSDGFANRNFMQLIHDDSLTFKEDIQKAQVSGQGDSLHEHIANLAGSPAIKKGILQTVKVVDELVKVMGRHKPENIVIEMARENQTTQKGQKNSRERMKRIEEGIKELGSQILKEHPVENTQLQNEKLYLYYLQNGRDMYVDQELDINRLSDYDVDHIVPQSFLKDDSIDNKVLTRSDKARGKSDNVPSEEVVKKMKNYWRQLLNAKLITQRKFDNLTKAERGGLSELDKAGFIKRQLVETRQITKHVAQILDSRMNTKYDENDKLIREVKVITLKSKLVSDFRKDFQFYKVREINNYHHAHDAYLNAVVGTALIKKYPKLESEFVYGDYKVYDVRKMIAKSEQEIGKATAKYFFYSNIMNFFKTEITLANGEIRKRPLIETNGETGEIVWDKGRDFATVRKVLSMPQVNIVKKTEVQTGGFSKESILPKRNSDKLIARKKDWDPKKYGGFDSPTVAYSVLVVAKVEKGKSKKLKSVKELLGITIMERSSFEKNPIDFLEAKGYKEVKKDLIIKLPKYSLFELENGRKRMLASAGELQKGNELALPSKYVNFLYLASHYEKLKGSPEDNEQKQLFVEQHKHYLDEIIEQISEFSKRVILADANLDKVLSAYNKHRDKPIREQAENIIHLFTLTNLGAPAAFKYFDTTIDRKRYTSTKEVLDATLIHQSITGLYETRIDLSQLGGDGGGGGGGSGSSGGWVQEISDSRPMLHIYLNGRRFLGLLNTGADKTCIAGRDWPANWPIHQTESSLQGLGMACGVARSSQPLRWQHEDKSGIIHPFVIPTLPFTLWGRDIMKDIKVRLMTDSPDDSQDLMIGAIESNLFADQISWKSDQPVWLNQWPLKQEKLQALQQLVTEQLQLGHLEESNSPWNTPVFVIKKKSGKWRLLQDLRAVNATMHDMGALQPGLPSPVAVPKGWEIIIIDLQDCFFNIKLHPEDCKRFAFSVPSPNFKRPYQRFQWKVLPQGMKNSPTLCQKFVDKAILTVRDKYQDSYIVHYMDDILLAHPSRSIVDEILTSMIQALNKHGLVVSTEKIQKYDNLKYLGTHIQGDSVSYQKLQIRTDKLRTLNDFQKLLGNINWIRPFLKLTTGELKPLFEILNPDSNPISTRKLTPEACKALQLMNERLSTARVKRLDLSQPWSLCILKTEYTPTACLWQDGVVEWIHLPHISPKVITPYDIFCTQLIIKGRHRSKELFSKDPDYIVVPYTKVQFDLLLQEKEDWPISLLGFLGEVHFHLPKDPLLTFTLQTAIIFPHMTSTTPLEKGIVIFTDGSANGRSVTYIQGREPIIKENTQNTAQQAEIVAVITAFEEVSQPFNLYTDSKYVTGLFPEIETATLSPRTKIYTELKHLQRLIHKRQEKFYIGHIRGHTGLPGPLAQGNAYADSLTRILTAGKRTADGSEFEKRTADGSEFESPKKKAKVE

SEQ ID NO: 3248 - protein, 2116 aa, synthetic construct
  source 1..2116: note = Description of Artificial Sequence: Synthetic polypeptide
MPAAKRVKLDGGDKKYSIGLDIGTNSVGWAVITDEYKVPSKKFKVLGNTDRHSIKKNLIGALLFDSGETAEATRLKRTARRRYTRRKNRICYLQEIFSNEMAKVDDSFFHRLEESFLVEEDKKHERHPIFGNIVDEVAYHEKYPTIYHLRKKLVDSTDKADLRLIYLALAHMIKFRGHFLIEGDLNPDNSDVDKLFIQLVQTYNQLFEENPINASGVDAKAILSARLSKSRRLENLIAQLPGEKKNGLFGNLIALSLGLTPNFKSNFDLAEDAKLQLSKDTYDDDLDNLLAQIGDQYADLFLAAKNLSDAILLSDILRVNTEITKAPLSASMIKRYDEHHQDLTLLKALVRQQLPEKYKEIFFDQSKNGYAGYIDGGASQEEFYKFIKPILEKMDGTEELLVKLNREDLLRKQRTFDNGSIPHQIHLGELHAILRRQEDFYPFLKDNREKIEKILTFRIPYYVGPLARGNSRFAWMTRKSEETITPWNFEEVVDKGASAQSFIERMTNFDKNLPNEKVLPKHSLLYEYFTVYNELTKVKYVTEGMRKPAFLSGEQKKAIVDLLFKTNRKVTVKQLKEDYFKKIECFDSVEISGVEDRFNASLGTYHDLLKIIKDKDFLDNEENEDILEDIVLTLTLFEDREMIEERLKTYAHLFDDKVMKQLKRRRYTGWGRLSRKLINGIRDKQSGKTILDFLKSDGFANRNFMQLIHDDSLTFKEDIQKAQVSGQGDSLHEHIANLAGSPAIKKGILQTVKVVDELVKVMGRHKPENIVIEMARENQTTQKGQKNSRERMKRIEEGIKELGSQILKEHPVENTQLQNEKLYLYYLQNGRDMYVDQELDINRLSDYDVDHIVPQSFLKDDSIDNKVLTRSDKARGKSDNVPSEEVVKKMKNYWRQLLNAKLITQRKFDNLTKAERGGLSELDKAGFIKRQLVETRQITKHVAQILDSRMNTKYDENDKLIREVKVITLKSKLVSDFRKDFQFYKVREINNYHHAHDAYLNAVVGTALIKKYPKLESEFVYGDYKVYDVRKMIAKSEQEIGKATAKYFFYSNIMNFFKTEITLANGEIRKRPLIETNGETGEIVWDKGRDFATVRKVLSMPQVNIVKKTEVQTGGFSKESILPKRNSDKLIARKKDWDPKKYGGFDSPTVAYSVLVVAKVEKGKSKKLKSVKELLGITIMERSSFEKNPIDFLEAKGYKEVKKDLIIKLPKYSLFELENGRKRMLASAGELQKGNELALPSKYVNFLYLASHYEKLKGSPEDNEQKQLFVEQHKHYLDEIIEQISEFSKRVILADANLDKVLSAYNKHRDKPIREQAENIIHLFTLTNLGAPAAFKYFDTTIDRKRYTSTKEVLDATLIHQSITGLYETRIDLSQLGGDGGGGGEAAAKGSSGGWVQEISDSRPMLHIYLNGRRFLGLLNTGADKTCIAGRDWPANWPIHQTESSLQGLGMACGVARSSQPLRWQHEDKSGIIHPFVIPTLPFTLWGRDIMKDIKVRLMTDSPDDSQDLMIGAIESNLFADQISWKSDQPVWLNQWPLKQEKLQALQQLVTEQLQLGHLEESNSPWNTPVFVIKKKSGKWRLLQDLRAVNATMHDMGALQPGLPSPVAPPKGWEIIIIDLQDCFFNIKLHPEDCKRFAFSVPSPNFKRPYQRFQWKVLPQGMKNSPTLCQKFVDKAILTVRDKYQDSYIVHYMDDILLAHPSRSIVDEILTSMIQALNKHGLVVSTEKIQKYDNLKYLGTHIQGDSVSYQKLQIRTDKLRTLNDFQKLLGNINWIRPFLKLTTGELKPLFEILNPDSNPISTRKLTPEACKALQLMNERLSTARVKRLDLSQPWSLCILKTEYTPTACLWQDGVVEWIHLPHISPKVITPYDIFCTQLIIKGRHRSKELFSKDPDYIVVPYTKVQFDLLLQEKEDWPISLLGFLGEVHFHLPKDPLLTFTLQTAIIFPHMTSTTPLEKGIVIFTDGSANGRSVTYIQGREPIIKENTQNTAQQAEIVAVITAFEEVSQPFNLYTDSKYVTGLFPEIETATLSPRTKIYTELKHLQRLIHKRQEKFYIGHIRGHTGLPGPLAQGNAYADSLTRILTAGKRTADGSEFEKRTADGSEFESPKKKAKVE

SEQ ID NO: 3249 - protein, 2116 aa, synthetic construct
  source 1..2116: note = Description of Artificial Sequence: Synthetic polypeptide
MPAAKRVKLDGGDKKYSIGLDIGTNSVGWAVITDEYKVPSKKFKVLGNTDRHSIKKNLIGALLFDSGETAEATRLKRTARRRYTRRKNRICYLQEIFSNEMAKVDDSFFHRLEESFLVEEDKKHERHPIFGNIVDEVAYHEKYPTIYHLRKKLVDSTDKADLRLIYLALAHMIKFRGHFLIEGDLNPDNSDVDKLFIQLVQTYNQLFEENPINASGVDAKAILSARLSKSRRLENLIAQLPGEKKNGLFGNLIALSLGLTPNFKSNFDLAEDAKLQLSKDTYDDDLDNLLAQIGDQYADLFLAAKNLSDAILLSDILRVNTEITKAPLSASMIKRYDEHHQDLTLLKALVRQQLPEKYKEIFFDQSKNGYAGYIDGGASQEEFYKFIKPILEKMDGTEELLVKLNREDLLRKQRTFDNGSIPHQIHLGELHAILRRQEDFYPFLKDNREKIEKILTFRIPYYVGPLARGNSRFAWMTRKSEETITPWNFEEVVDKGASAQSFIERMTNFDKNLPNEKVLPKHSLLYEYFTVYNELTKVKYVTEGMRKPAFLSGEQKKAIVDLLFKTNRKVTVKQLKEDYFKKIECFDSVEISGVEDRFNASLGTYHDLLKIIKDKDFLDNEENEDILEDIVLTLTLFEDREMIEERLKTYAHLFDDKVMKQLKRRRYTGWGRLSRKLINGIRDKQSGKTILDFLKSDGFANRNFMQLIHDDSLTFKEDIQKAQVSGQGDSLHEHIANLAGSPAIKKGILQTVKVVDELVKVMGRHKPENIVIEMARENQTTQKGQKNSRERMKRIEEGIKELGSQILKEHPVENTQLQNEKLYLYYLQNGRDMYVDQELDINRLSDYDVDHIVPQSFLKDDSIDNKVLTRSDKARGKSDNVPSEEVVKKMKNYWRQLLNAKLITQRKFDNLTKAERGGLSELDKAGFIKRQLVETRQITKHVAQILDSRMNTKYDENDKLIREVKVITLKSKLVSDFRKDFQFYKVREINNYHHAHDAYLNAVVGTALIKKYPKLESEFVYGDYKVYDVRKMIAKSEQEIGKATAKYFFYSNIMNFFKTEITLANGEIRKRPLIETNGETGEIVWDKGRDFATVRKVLSMPQVNIVKKTEVQTGGFSKESILPKRNSDKLIARKKDWDPKKYGGFDSPTVAYSVLVVAKVEKGKSKKLKSVKELLGITIMERSSFEKNPIDFLEAKGYKEVKKDLIIKLPKYSLFELENGRKRMLASAGELQKGNELALPSKYVNFLYLASHYEKLKGSPEDNEQKQLFVEQHKHYLDEIIEQISEFSKRVILADANLDKVLSAYNKHRDKPIREQAENIIHLFTLTNLGAPAAFKYFDTTIDRKRYTSTKEVLDATLIHQSITGLYETRIDLSQLGGDGGEAAAKGGGGSSGGWVQEISDSRPMLHIYLNGRRFLGLLNTGADKTCIAGRDWPANWPIHQTESSLQGLGMACGVARSSQPLRWQHEDKSGIIHPFVIPTLPFTLWGRDIMKDIKVRLMTDSPDDSQDLMIGAIESNLFADQISWKSDQPVWLNQWPLKQEKLQALQQLVTEQLQLGHLEESNSPWNTPVFVIKKKSGKWRLLQDLRAVNATMHDMGALQPGLPSPVAPPKGWEIIIIDLQDCFFNIKLHPEDCKRFAFSVPSPNFKRPYQRFQWKVLPQGMKNSPTLCQKFVDKAILTVRDKYQDSYIVHYMDDILLAHPSRSIVDEILTSMIQALNKHGLVVSTEKIQKYDNLKYLGTHIQGDSVSYQKLQIRTDKLRTLNDFQKLLGNINWIRPFLKLTTGELKPLFEILNPDSNPISTRKLTPEACKALQLMNERLSTARVKRLDLSQPWSLCILKTEYTPTACLWQDGVVEWIHLPHISPKVITPYDIFCTQLIIKGRHRSKELFSKDPDYIVVPYTKVQFDLLLQEKEDWPISLLGFLGEVHFHLPKDPLLTFTLQTAIIFPHMTSTTPLEKGIVIFTDGSANGRSVTYIQGREPIIKENTQNTAQQAEIVAVITAFEEVSQPFNLYTDSKYVTGLFPEIETATLSPRTKIYTELKHLQRLIHKRQEKFYIGHIRGHTGLPGPLAQGNAYADSLTRILTAGKRTADGSEFEKRTADGSEFESPKKKAKVE

SEQ ID NO: 3250 - protein, 2116 aa, synthetic construct
  source 1..2116: note = Description of Artificial Sequence: Synthetic polypeptide
MPAAKRVKLDGGDKKYSIGLDIGTNSVGWAVITDEYKVPSKKFKVLGNTDRHSIKKNLIGALLFDSGETAEATRLKRTARRRYTRRKNRICYLQEIFSNEMAKVDDSFFHRLEESFLVEEDKKHERHPIFGNIVDEVAYHEKYPTIYHLRKKLVDSTDKADLRLIYLALAHMIKFRGHFLIEGDLNPDNSDVDKLFIQLVQTYNQLFEENPINASGVDAKAILSARLSKSRRLENLIAQLPGEKKNGLFGNLIALSLGLTPNFKSNFDLAEDAKLQLSKDTYDDDLDNLLAQIGDQYADLFLAAKNLSDAILLSDILRVNTEITKAPLSASMIKRYDEHHQDLTLLKALVRQQLPEKYKEIFFDQSKNGYAGYIDGGASQEEFYKFIKPILEKMDGTEELLVKLNREDLLRKQRTFDNGSIPHQIHLGELHAILRRQEDFYPFLKDNREKIEKILTFRIPYYVGPLARGNSRFAWMTRKSEETITPWNFEEVVDKGASAQSFIERMTNFDKNLPNEKVLPKHSLLYEYFTVYNELTKVKYVTEGMRKPAFLSGEQKKAIVDLLFKTNRKVTVKQLKEDYFKKIECFDSVEISGVEDRFNASLGTYHDLLKIIKDKDFLDNEENEDILEDIVLTLTLFEDREMIEERLKTYAHLFDDKVMKQLKRRRYTGWGRLSRKLINGIRDKQSGKTILDFLKSDGFANRNFMQLIHDDSLTFKEDIQKAQVSGQGDSLHEHIANLAGSPAIKKGILQTVKVVDELVKVMGRHKPENIVIEMARENQTTQKGQKNSRERMKRIEEGIKELGSQILKEHPVENTQLQNEKLYLYYLQNGRDMYVDQELDINRLSDYDVDHIVPQSFLKDDSIDNKVLTRSDKARGKSDNVPSEEVVKKMKNYWRQLLNAKLITQRKFDNLTKAERGGLSELDKAGFIKRQLVETRQITKHVAQILDSRMNTKYDENDKLIREVKVITLKSKLVSDFRKDFQFYKVREINNYHHAHDAYLNAVVGTALIKKYPKLESEFVYGDYKVYDVRKMIAKSEQEIGKATAKYFFYSNIMNFFKTEITLANGEIRKRPLIETNGETGEIVWDKGRDFATVRKVLSMPQVNIVKKTEVQTGGFSKESILPKRNSDKLIARKKDWDPKKYGGFDSPTVAYSVLVVAKVEKGKSKKLKSVKELLGITIMERSSFEKNPIDFLEAKGYKEVKKDLIIKLPKYSLFELENGRKRMLASAGELQKGNELALPSKYVNFLYLASHYEKLKGSPEDNEQKQLFVEQHKHYLDEIIEQISEFSKRVILADANLDKVLSAYNKHRDKPIREQAENIIHLFTLTNLGAPAAFKYFDTTIDRKRYTSTKEVLDATLIHQSITGLYETRIDLSQLGGDGGEAAAKGSSGGSGGVQEISDSRPMLHIYLNGRRFLGLLDTGADKTCIAGRDWPANWPIHQTESSLQGLGMACGVARSSQPLRWQHEDKSGIIHPFVIPTLPFTLWGRDIMKDIKVRLMTDSPDDSQDLMIGAIESNLFADQISWKSDQPVWLNQWPLKQEKLQALQQLVTEQLQLGHLEESNSPWNTPVFVIKKKSGKWRLLQDLRAVNATMHDMGALQPGLPSPPAVPKGWEIIIIDLQDCFFNIKLHPEDCKRFAFSVPSPNFKRPYQRFQWKVLPQGMKNSPTLCQKFVDKAILTVRDKYQDSYIVHYMDDILLAHPSRSIVDEILTSMIQALNKHGLVVSTEKIQKYDNLKYLGTHIQGDSVSYQKLQIRTDKLRTLNDFQKLLGNINWIRPFLKLTTGELKPLFEILNPDSNPISTRKLTPEACKALQLMNERLSTARVKRLDLSQPWSLCILKTEYTPTACLWQDGVVEWIHLPHISPKVITPYDIFCTQLIIKGRHRSKELFSKDPDYIVVPYTKVQFDLLLQEKEDWPISLLGFLGEVHFHLPKDPLLTFTLQTAIIFPHMTSTTPLEKGIVIFTDGSANGRSVTYIQGREPIIKENTQNTAQQAEIVAVITAFEEVSQPFNLYTDSKYVTGLFPEIETATLSPRTKIYTELKHLQRLIHKRQEKFYIGHIRGHTGLPGPLAQGNAYADSLTRILTAAGKRTADGSEFEKRTADGSEFESPKKKAKVE

SEQ ID NO: 3251 - protein, 2116 aa, synthetic construct
  source 1..2116: note = Description of Artificial Sequence: Synthetic polypeptide
MPAAKRVKLDGGDKKYSIGLDIGTNSVGWAVITDEYKVPSKKFKVLGNTDRHSIKKNLIGALLFDSGETAEATRLKRTARRRYTRRKNRICYLQEIFSNEMAKVDDSFFHRLEESFLVEEDKKHERHPIFGNIVDEVAYHEKYPTIYHLRKKLVDSTDKADLRLIYLALAHMIKFRGHFLIEGDLNPDNSDVDKLFIQLVQTYNQLFEENPINASGVDAKAILSARLSKSRRLENLIAQLPGEKKNGLFGNLIALSLGLTPNFKSNFDLAEDAKLQLSKDTYDDDLDNLLAQIGDQYADLFLAAKNLSDAILLSDILRVNTEITKAPLSASMIKRYDEHHQDLTLLKALVRQQLPEKYKEIFFDQSKNGYAGYIDGGASQEEFYKFIKPILEKMDGTEELLVKLNREDLLRKQRTFDNGSIPHQIHLGELHAILRRQEDFYPFLKDNREKIEKILTFRIPYYVGPLARGNSRFAWMTRKSEETITPWNFEEVVDKGASAQSFIERMTNFDKNLPNEKVLPKHSLLYEYFTVYNELTKVKYVTEGMRKPAFLSGEQKKAIVDLLFKTNRKVTVKQLKEDYFKKIECFDSVEISGVEDRFNASLGTYHDLLKIIKDKDFLDNEENEDILEDIVLTLTLFEDREMIEERLKTYAHLFDDKVMKQLKRRRYTGWGRLSRKLINGIRDKQSGKTILDFLKSDGFANRNFMQLIHDDSLTFKEDIQKAQVSGQGDSLHEHIANLAGSPAIKKGILQTVKVVDELVKVMGRHKPENIVIEMARENQTTQKGQKNSRERMKRIEEGIKELGSQILKEHPVENTQLQNEKLYLYYLQNGRDMYVDQELDINRLSDYDVDHIVPQSFLKDDSIDNKVLTRSDKARGKSDNVPSEEVVKKMKNYWRQLLNAKLITQRKFDNLTKAERGGLSELDKAGFIKRQLVETRQITKHVAQILDSRMNTKYDENDKLIREVKVITLKSKLVSDFRKDFQFYKVREINNYHHAHDAYLNAVVGTALIKKYPKLESEFVYGDYKVYDVRKMIAKSEQEIGKATAKYFFYSNIMNFFKTEITLANGEIRKRPLIETNGETGEIVWDKGRDFATVRKVLSMPQVNIVKKTEVQTGGFSKESILPKRNSDKLIARKKDWDPKKYGGFDSPTVAYSVLVVAKVEKGKSKKLKSVKELLGITIMERSSFEKNPIDFLEAKGYKEVKKDLIIKLPKYSLFELENGRKRMLASAGELQKGNELALPSKYVNFLYLASHYEKLKGSPEDNEQKQLFVEQHKHYLDEIIEQISEFSKRVILADANLDKVLSAYNKHRDKPIREQAENIIHLFTLTNLGAPAAFKYFDTTIDRKRYTSTKEVLDATLIHQSITGLYETRIDLSQLGGDGGPAPEAAAKGGSGGVQEISDSRPMLHIYLNGRRFLGLLDTGADKTCIAGRDWPANWPIHQTESSLQGLGMACGVARSSQPLRWQHEDKSGIIHPFVIPTLPFTLWGRDIMKDIKVRLMTDSPDDSQDLMIGAIESNLFADQISWKSDQPVWLNQWPLKQEKLQALQQLVTEQLQLGHLEESNSPWNTPVFVIKKKSGKWRLLQDLRAVNATMHDMGALQPGLPSPPAVPKGWEIIIIDLQDCFFNIKLHPEDCKRFAFSVPSPNFKRPYQRFQWKVLPQGMKNSPTLCQKFVDKAILTVRDKYQDSYIVHYMDDILLAHPSRSIVDEILTSMIQALNKHGLVVSTEKIQKYDNLKYLGTHIQGDSVSYQKLQIRTDKLRTLNDFQKLLGNINWIRPFLKLTTGELKPLFEILNPDSNPISTRKLTPEACKALQLMNERLSTARVKRLDLSQPWSLCILKTEYTPTACLWQDGVVEWIHLPHISPKVITPYDIFCTQLIIKGRHRSKELFSKDPDYIVVPYTKVQFDLLLQEKEDWPISLLGFLGEVHFHLPKDPLLTFTLQTAIIFPHMTSTTPLEKGIVIFTDGSANGRSVTYIQGREPIIKENTQNTAQQAEIVAVITAFEEVSQPFNLYTDSKYVTGLFPEIETATLSPRTKIYTELKHLQRLIHKRQEKFYIGHIRGHTGLPGPLAQGNAYADSLTRILTAAGKRTADGSEFEKRTADGSEFESPKKKAKVE

SEQ ID NO: 3252 - protein, 2116 aa, synthetic construct
  source 1..2116: note = Description of Artificial Sequence: Synthetic polypeptide
MPAAKRVKLDGGDKKYSIGLDIGTNSVGWAVITDEYKVPSKKFKVLGNTDRHSIKKNLIGALLFDSGETAEATRLKRTARRRYTRRKNRICYLQEIFSNEMAKVDDSFFHRLEESFLVEEDKKHERHPIFGNIVDEVAYHEKYPTIYHLRKKLVDSTDKADLRLIYLALAHMIKFRGHFLIEGDLNPDNSDVDKLFIQLVQTYNQLFEENPINASGVDAKAILSARLSKSRRLENLIAQLPGEKKNGLFGNLIALSLGLTPNFKSNFDLAEDAKLQLSKDTYDDDLDNLLAQIGDQYADLFLAAKNLSDAILLSDILRVNTEITKAPLSASMIKRYDEHHQDLTLLKALVRQQLPEKYKEIFFDQSKNGYAGYIDGGASQEEFYKFIKPILEKMDGTEELLVKLNREDLLRKQRTFDNGSIPHQIHLGELHAILRRQEDFYPFLKDNREKIEKILTFRIPYYVGPLARGNSRFAWMTRKSEETITPWNFEEVVDKGASAQSFIERMTNFDKNLPNEKVLPKHSLLYEYFTVYNELTKVKYVTEGMRKPAFLSGEQKKAIVDLLFKTNRKVTVKQLKEDYFKKIECFDSVEISGVEDRFNASLGTYHDLLKIIKDKDFLDNEENEDILEDIVLTLTLFEDREMIEERLKTYAHLFDDKVMKQLKRRRYTGWGRLSRKLINGIRDKQSGKTILDFLKSDGFANRNFMQLIHDDSLTFKEDIQKAQVSGQGDSLHEHIANLAGSPAIKKGILQTVKVVDELVKVMGRHKPENIVIEMARENQTTQKGQKNSRERMKRIEEGIKELGSQILKEHPVENTQLQNEKLYLYYLQNGRDMYVDQELDINRLSDYDVDHIVPQSFLKDDSIDNKVLTRSDKARGKSDNVPSEEVVKKMKNYWRQLLNAKLITQRKFDNLTKAERGGLSELDKAGFIKRQLVETRQITKHVAQILDSRMNTKYDENDKLIREVKVITLKSKLVSDFRKDFQFYKVREINNYHHAHDAYLNAVVGTALIKKYPKLESEFVYGDYKVYDVRKMIAKSEQEIGKATAKYFFYSNIMNFFKTEITLANGEIRKRPLIETNGETGEIVWDKGRDFATVRKVLSMPQVNIVKKTEVQTGGFSKESILPKRNSDKLIARKKDWDPKKYGGFDSPTVAYSVLVVAKVEKGKSKKLKSVKELLGITIMERSSFEKNPIDFLEAKGYKEVKKDLIIKLPKYSLFELENGRKRMLASAGELQKGNELALPSKYVNFLYLASHYEKLKGSPEDNEQKQLFVEQHKHYLDEIIEQISEFSKRVILADANLDKVLSAYNKHRDKPIREQAENIIHLFTLTNLGAPAAFKYFDTTIDRKRYTSTKEVLDATLIHQSITGLYETRIDLSQLGGDGGGGGGSSEAAAKGGVQEISDSRPMLHIYLNGRRFLGLLDTGADKTCIAGRDWPANWPIHQTESSLQGLGMACGVARSSQPLRWQHEDKSGIIHPFVIPTLPFTLWGRDIMKDIKVRLMTDSPDDSQDLMIGAIESNLFADQISWKSDQPVWLNQWPLKQEKLQALQQLVTEQLQLGHLEESNSPWNTPVFVIKKKSGKWRLLQDLRAVNATMHDMGALQPGLPSPVAVPKGWEIIIIDLQDCFFNIKLHPEDCKRFAFSVPSPNFKRPYQRFQWKVLPQGMKNSPTLCQKFVDKAILTVRDKYQDSYIVHYMDDILLAHPSRSIVDEILTSMIQALNKHGLVVSTEKIQKYDNLKYLGTHIQGDSVSYQKLQIRTDKLRTLNDFQKLLGNINWIRPFLKLTTGELKPLFEILNPDSNPISTRKLTPEACKALQLMNERLSTARVKRLDLSQPWSLCILKTEYTPTACLWQDGVVEWIHLPHISPKVITPYDIFCTQLIIKGRHRSKELFSKDPDYIVVPYTKVQFDLLLQEKEDWPISLLGFLGEVHFHLPKDPLLTFTLQTAIIFPHMTSTTPLEKGIVIFTDGSANGRSVTYIQGREPIIKENTQNTAQQAEIVAVITAFEEVSQPFNLYTDSKYVTGLFPEIETATLSPRTKIYTELKHLQRLIHKRQEKFYIGHIRGHTGLPGPLAQGNAYADSLTRILTAAGKRTADGSEFEKRTADGSEFESPKKKAKVE

SEQ ID NO: 3253 - protein, 2114 aa, synthetic construct
  source 1..2114: note = Description of Artificial Sequence: Synthetic polypeptide
MPAAKRVKLDGGDKKYSIGLDIGTNSVGWAVITDEYKVPSKKFKVLGNTDRHSIKKNLIGALLFDSGETAEATRLKRTARRRYTRRKNRICYLQEIFSNEMAKVDDSFFHRLEESFLVEEDKKHERHPIFGNIVDEVAYHEKYPTIYHLRKKLVDSTDKADLRLIYLALAHMIKFRGHFLIEGDLNPDNSDVDKLFIQLVQTYNQLFEENPINASGVDAKAILSARLSKSRRLENLIAQLPGEKKNGLFGNLIALSLGLTPNFKSNFDLAEDAKLQLSKDTYDDDLDNLLAQIGDQYADLFLAAKNLSDAILLSDILRVNTEITKAPLSASMIKRYDEHHQDLTLLKALVRQQLPEKYKEIFFDQSKNGYAGYIDGGASQEEFYKFIKPILEKMDGTEELLVKLNREDLLRKQRTFDNGSIPHQIHLGELHAILRRQEDFYPFLKDNREKIEKILTFRIPYYVGPLARGNSRFAWMTRKSEETITPWNFEEVVDKGASAQSFIERMTNFDKNLPNEKVLPKHSLLYEYFTVYNELTKVKYVTEGMRKPAFLSGEQKKAIVDLLFKTNRKVTVKQLKEDYFKKIECFDSVEISGVEDRFNASLGTYHDLLKIIKDKDFLDNEENEDILEDIVLTLTLFEDREMIEERLKTYAHLFDDKVMKQLKRRRYTGWGRLSRKLINGIRDKQSGKTILDFLKSDGFANRNFMQLIHDDSLTFKEDIQKAQVSGQGDSLHEHIANLAGSPAIKKGILQTVKVVDELVKVMGRHKPENIVIEMARENQTTQKGQKNSRERMKRIEEGIKELGSQILKEHPVENTQLQNEKLYLYYLQNGRDMYVDQELDINRLSDYDVDHIVPQSFLKDDSIDNKVLTRSDKARGKSDNVPSEEVVKKMKNYWRQLLNAKLITQRKFDNLTKAERGGLSELDKAGFIKRQLVETRQITKHVAQILDSRMNTKYDENDKLIREVKVITLKSKLVSDFRKDFQFYKVREINNYHHAHDAYLNAVVGTALIKKYPKLESEFVYGDYKVYDVRKMIAKSEQEIGKATAKYFFYSNIMNFFKTEITLANGEIRKRPLIETNGETGEIVWDKGRDFATVRKVLSMPQVNIVKKTEVQTGGFSKESILPKRNSDKLIARKKDWDPKKYGGFDSPTVAYSVLVVAKVEKGKSKKLKSVKELLGITIMERSSFEKNPIDFLEAKGYKEVKKDLIIKLPKYSLFELENGRKRMLASAGELQKGNELALPSKYVNFLYLASHYEKLKGSPEDNEQKQLFVEQHKHYLDEIIEQISEFSKRVILADANLDKVLSAYNKHRDKPIREQAENIIHLFTLTNLGAPAAFKYFDTTIDRKRYTSTKEVLDATLIHQSITGLYETRIDLSQLGGDGGGGGGGSGSSGGVQEISDSRPMLHIYLNGRRFLGLLDTGADKTCIAGRDWPANWPIHQTESSLQGLGMACGVARSSQPLRWQHEDKSGIIHPFVIPTLPFTLWGRDIMKDIKVRLMTDSPDDSQDLMIGAIESNLFADQISWKSDQPVWLNQWPLKQEKLQALQQLVTEQLQLGHLEESNSPWNTPVFVIKKKSGKWRLLQDLRAVNATMHDMGALQPGLPSPVAVPKGWEIIIIDLQDCFFNIKLHPEDCKRFAFSVPSPNFKRPYQRFQWKVLPQGMKNSPTLCQKFVDKAILTVRDKYQDSYIVHYMDDILLAHPSRSIVDEILTSMIQALNKHGLVVSTEKIQKYDNLKYLGTHIQGDSVSYQKLQIRTDKLRTLNDFQKLLGNINWIRPFLKLTTGELKPLFEILNPDSNPISTRKLTPEACKALQLMNERLSTARVKRLDLSQPWSLCILKTEYTPTACLWQDGVVEWIHLPHISPKVITPYDIFCTQLIIKGRHRSKELFSKDPDYIVVPYTKVQFDLLLQEKEDWPISLLGFLGEVHFHLPKDPLLTFTLQTAIIFPHMTSTTPLEKGIVIFTDGSANGRSVTYIQGREPIIKENTQNTAQQAEIVAVITAFEEVSQPFNLYTDSKYVTGLFPEIETATLSPRTKIYTELKHLQRLIHKRQEKFYIGHIRGHTGLPGPLAQGNAYADSLTRILTAAGKRTADGSEFEKRTADGSEFESPKKKAKVE

SEQ ID NO: 3254 - protein, 2125 aa, synthetic construct
  source 1..2125: note = Description of Artificial Sequence: Synthetic polypeptide
MPAAKRVKLDGGDKKYSIGLDIGTNSVGWAVITDEYKVPSKKFKVLGNTDRHSIKKNLIGALLFDSGETAEATRLKRTARRRYTRRKNRICYLQEIFSNEMAKVDDSFFHRLEESFLVEEDKKHERHPIFGNIVDEVAYHEKYPTIYHLRKKLVDSTDKADLRLIYLALAHMIKFRGHFLIEGDLNPDNSDVDKLFIQLVQTYNQLFEENPINASGVDAKAILSARLSKSRRLENLIAQLPGEKKNGLFGNLIALSLGLTPNFKSNFDLAEDAKLQLSKDTYDDDLDNLLAQIGDQYADLFLAAKNLSDAILLSDILRVNTEITKAPLSASMIKRYDEHHQDLTLLKALVRQQLPEKYKEIFFDQSKNGYAGYIDGGASQEEFYKFIKPILEKMDGTEELLVKLNREDLLRKQRTFDNGSIPHQIHLGELHAILRRQEDFYPFLKDNREKIEKILTFRIPYYVGPLARGNSRFAWMTRKSEETITPWNFEEVVDKGASAQSFIERMTNFDKNLPNEKVLPKHSLLYEYFTVYNELTKVKYVTEGMRKPAFLSGEQKKAIVDLLFKTNRKVTVKQLKEDYFKKIECFDSVEISGVEDRFNASLGTYHDLLKIIKDKDFLDNEENEDILEDIVLTLTLFEDREMIEERLKTYAHLFDDKVMKQLKRRRYTGWGRLSRKLINGIRDKQSGKTILDFLKSDGFANRNFMQLIHDDSLTFKEDIQKAQVSGQGDSLHEHIANLAGSPAIKKGILQTVKVVDELVKVMGRHKPENIVIEMARENQTTQKGQKNSRERMKRIEEGIKELGSQILKEHPVENTQLQNEKLYLYYLQNGRDMYVDQELDINRLSDYDVDHIVPQSFLKDDSIDNKVLTRSDKARGKSDNVPSEEVVKKMKNYWRQLLNAKLITQRKFDNLTKAERGGLSELDKAGFIKRQLVETRQITKHVAQILDSRMNTKYDENDKLIREVKVITLKSKLVSDFRKDFQFYKVREINNYHHAHDAYLNAVVGTALIKKYPKLESEFVYGDYKVYDVRKMIAKSEQEIGKATAKYFFYSNIMNFFKTEITLANGEIRKRPLIETNGETGEIVWDKGRDFATVRKVLSMPQVNIVKKTEVQTGGFSKESILPKRNSDKLIARKKDWDPKKYGGFDSPTVAYSVLVVAKVEKGKSKKLKSVKELLGITIMERSSFEKNPIDFLEAKGYKEVKKDLIIKLPKYSLFELENGRKRMLASAGELQKGNELALPSKYVNFLYLASHYEKLKGSPEDNEQKQLFVEQHKHYLDEIIEQISEFSKRVILADANLDKVLSAYNKHRDKPIREQAENIIHLFTLTNLGAPAAFKYFDTTIDRKRYTSTKEVLDATLIHQSITGLYETRIDLSQLGGDGGGGGGSGGGGSGGGGSGGGGSGGVQEISDSRPMLHIYLNGRRFLGLLDTGADKTCIAGRDWPANWPIHQTESSLQGLGMACGVARSSQPLRWQHEDKSGIIHPFVIPTLPFTLWGRDIMKDIKVRLMTDSPDDSQDLMIGAIESNLFADQISWKSDQPVWLNQWPLKQEKLQALQQLVTEQLQLGHLEESNSPWNTPVFVIKKKSGKWRLLQDLRAVNATMHDMGALQPGLPSPVAVPKGWEIIIIDLQDCFFNIKLHPEDCKRFAFSVPSPNFKRPYQRFQWKVLPQGMKNSPTLCQKFVDKAILTVRDKYQDSYIVHYMDDILLAHPSRSIVDEILTSMIQALNKHGLVVSTEKIQKYDNLKYLGTHIQGDSVSYQKLQIRTDKLRTLNDFQKLLGNINWIRPFLKLTTGELKPLFEILNPDSNPISTRKLTPEACKALQLMNERLSTARVKRLDLSQPWSLCILKTEYTPTACLWQDGVVEWIHLPHISPKVITPYDIFCTQLIIKGRHRSKELFSKDPDYIVVPYTKVQFDLLLQEKEDWPISLLGFLGEVHFHLPKDPLLTFTLQTAIIFPHMTSTTPLEKGIVIFTDGSANGRSVTYIQGREPIIKENTQNTAQQAEIVAVITAFEEVSQPFNLYTDSKYVTGLFPEIETATLSPRTKIYTELKHLQRLIHKRQEKFYIGHIRGHTGLPGPLAQGNAYADSLTRILTAAGKRTADGSEFEKRTADGSEFESPKKKAKVE

SEQ ID NO: 3255 - protein, 2116 aa, synthetic construct
  source 1..2116: note = Description of Artificial Sequence: Synthetic polypeptide
MPAAKRVKLDGGDKKYSIGLDIGTNSVGWAVITDEYKVPSKKFKVLGNTDRHSIKKNLIGALLFDSGETAEATRLKRTARRRYTRRKNRICYLQEIFSNEMAKVDDSFFHRLEESFLVEEDKKHERHPIFGNIVDEVAYHEKYPTIYHLRKKLVDSTDKADLRLIYLALAHMIKFRGHFLIEGDLNPDNSDVDKLFIQLVQTYNQLFEENPINASGVDAKAILSARLSKSRRLENLIAQLPGEKKNGLFGNLIALSLGLTPNFKSNFDLAEDAKLQLSKDTYDDDLDNLLAQIGDQYADLFLAAKNLSDAILLSDILRVNTEITKAPLSASMIKRYDEHHQDLTLLKALVRQQLPEKYKEIFFDQSKNGYAGYIDGGASQEEFYKFIKPILEKMDGTEELLVKLNREDLLRKQRTFDNGSIPHQIHLGELHAILRRQEDFYPFLKDNREKIEKILTFRIPYYVGPLARGNSRFAWMTRKSEETITPWNFEEVVDKGASAQSFIERMTNFDKNLPNEKVLPKHSLLYEYFTVYNELTKVKYVTEGMRKPAFLSGEQKKAIVDLLFKTNRKVTVKQLKEDYFKKIECFDSVEISGVEDRFNASLGTYHDLLKIIKDKDFLDNEENEDILEDIVLTLTLFEDREMIEERLKTYAHLFDDKVMKQLKRRRYTGWGRLSRKLINGIRDKQSGKTILDFLKSDGFANRNFMQLIHDDSLTFKEDIQKAQVSGQGDSLHEHIANLAGSPAIKKGILQTVKVVDELVKVMGRHKPENIVIEMARENQTTQKGQKNSRERMKRIEEGIKELGSQILKEHPVENTQLQNEKLYLYYLQNGRDMYVDQELDINRLSDYDVDHIVPQSFLKDDSIDNKVLTRSDKARGKSDNVPSEEVVKKMKNYWRQLLNAKLITQRKFDNLTKAERGGLSELDKAGFIKRQLVETRQITKHVAQILDSRMNTKYDENDKLIREVKVITLKSKLVSDFRKDFQFYKVREINNYHHAHDAYLNAVVGTALIKKYPKLESEFVYGDYKVYDVRKMIAKSEQEIGKATAKYFFYSNIMNFFKTEITLANGEIRKRPLIETNGETGEIVWDKGRDFATVRKVLSMPQVNIVKKTEVQTGGFSKESILPKRNSDKLIARKKDWDPKKYGGFDSPTVAYSVLVVAKVEKGKSKKLKSVKELLGITIMERSSFEKNPIDFLEAKGYKEVKKDLIIKLPKYSLFELENGRKRMLASAGELQKGNELALPSKYVNFLYLASHYEKLKGSPEDNEQKQLFVEQHKHYLDEIIEQISEFSKRVILADANLDKVLSAYNKHRDKPIREQAENIIHLFTLTNLGAPAAFKYFDTTIDRKRYTSTKEVLDATLIHQSITGLYETRIDLSQLGGDGGPAPEAAAKGGGGGVQEISDSRPMLHIYLNGRRFLGLLDTGADKTCIAGRDWPANWPIHQTESSLQGLGMACGVARSSQPLRWQHEDKSGIIHPFVIPTLPFTLWGRDIMKDIKVRLMTDSPDDSQDLMIGAIESNLFADQISWKSDQPVWLNQWPLKQEKLQALQQLVTEQLQLGHLEESNSPWNTPVFVIKKKSGKWRLLQDLRAVNATMHDMGALQPGLPSPVAVPKGWEIIIIDLQDCFFNIKLHPEDCKRFAFSVPSPNFKRPYQRFQWKVLPQGMKNSPTLCQKFVDKAILTVRDKYQDSYIVHYMDDILLAHPSRSIVDEILTSMIQALNKHGLVVSTEKIQKYDNLKYLGTHIQGDSVSYQKLQIRTDKLRTLNDFQKLLGNINWIRPFLKLTTGELKPLFEILNPDSNPISTRKLTPEACKALQLMNERLSTARVKRLDLSQPWSLCILKTEYTPTACLWQDGVVEWIHLPHISPKVITPYDIFCTQLIIKGRHRSKELFSKDPDYIVVPYTKVQFDLLLQEKEDWPISLLGFLGEVHFHLPKDPLLTFTLQTAIIFPHMTSTTPLEKGIVIFTDGSANGRSVTYIQGREPIIKENTQNTAQQAEIVAVITAFEEVSQPFNLYTDSKYVTGLFPEIETATLSPRTKIYTELKHLQRLIHKRQEKFYIGHIRGHTGLPGPLAQGNAYADSLTRILTAAGKRTADGSEFEKRTADGSEFESPKKKAKVE

SEQ ID NO: 3256 - protein, 2112 aa, synthetic construct
  source 1..2112: note = Description of Artificial Sequence: Synthetic polypeptide
MPAAKRVKLDGGDKKYSIGLDIGTNSVGWAVITDEYKVPSKKFKVLGNTDRHSIKKNLIGALLFDSGETAEATRLKRTARRRYTRRKNRICYLQEIFSNEMAKVDDSFFHRLEESFLVEEDKKHERHPIFGNIVDEVAYHEKYPTIYHLRKKLVDSTDKADLRLIYLALAHMIKFRGHFLIEGDLNPDNSDVDKLFIQLVQTYNQLFEENPINASGVDAKAILSARLSKSRRLENLIAQLPGEKKNGLFGNLIALSLGLTPNFKSNFDLAEDAKLQLSKDTYDDDLDNLLAQIGDQYADLFLAAKNLSDAILLSDILRVNTEITKAPLSASMIKRYDEHHQDLTLLKALVRQQLPEKYKEIFFDQSKNGYAGYIDGGASQEEFYKFIKPILEKMDGTEELLVKLNREDLLRKQRTFDNGSIPHQIHLGELHAILRRQEDFYPFLKDNREKIEKILTFRIPYYVGPLARGNSRFAWMTRKSEETITPWNFEEVVDKGASAQSFIERMTNFDKNLPNEKVLPKHSLLYEYFTVYNELTKVKYVTEGMRKPAFLSGEQKKAIVDLLFKTNRKVTVKQLKEDYFKKIECFDSVEISGVEDRFNASLGTYHDLLKIIKDKDFLDNEENEDILEDIVLTLTLFEDREMIEERLKTYAHLFDDKVMKQLKRRRYTGWGRLSRKLINGIRDKQSGKTILDFLKSDGFANRNFMQLIHDDSLTFKEDIQKAQVSGQGDSLHEHIANLAGSPAIKKGILQTVKVVDELVKVMGRHKPENIVIEMARENQTTQKGQKNSRERMKRIEEGIKELGSQILKEHPVENTQLQNEKLYLYYLQNGRDMYVDQELDINRLSDYDVDHIVPQSFLKDDSIDNKVLTRSDKARGKSDNVPSEEVVKKMKNYWRQLLNAKLITQRKFDNLTKAERGGLSELDKAGFIKRQLVETRQITKHVAQILDSRMNTKYDENDKLIREVKVITLKSKLVSDFRKDFQFYKVREINNYHHAHDAYLNAVVGTALIKKYPKLESEFVYGDYKVYDVRKMIAKSEQEIGKATAKYFFYSNIMNFFKTEITLANGEIRKRPLIETNGETGEIVWDKGRDFATVRKVLSMPQVNIVKKTEVQTGGFSKESILPKRNSDKLIARKKDWDPKKYGGFDSPTVAYSVLVVAKVEKGKSKKLKSVKELLGITIMERSSFEKNPIDFLEAKGYKEVKKDLIIKLPKYSLFELENGRKRMLASAGELQKGNELALPSKYVNFLYLASHYEKLKGSPEDNEQKQLFVEQHKHYLDEIIEQISEFSKRVILADANLDKVLSAYNKHRDKPIREQAENIIHLFTLTNLGAPAAFKYFDTTIDRKRYTSTKEVLDATLIHQSITGLYETRIDLSQLGGDGGPAPAPAPGGVQEISDSRPMLHIYLNGRRFLGLLDTGADKTCIAGRDWPANWPIHQTESSLQGLGMACGVARSSQPLRWQHEDKSGIIHPFVIPTLPFTLWGRDIMKDIKVRLMTDSPDDSQDLMIGAIESNLFADQISWKSDQPVWLNQWPLKQEKLQALQQLVTEQLQLGHLEESNSPWNTPVFVIKKKSGKWRLLQDLRAVNATMHDMGALQPGLPSPVAVPKGWEIIIIDLQDCFFNIKLHPEDCKRFAFSVPSPNFKRPYQRFQWKVLPQGMKNSPTLCQKFVDKAILTVRDKYQDSYIVHYMDDILLAHPSRSIVDEILTSMIQALNKHGLVVSTEKIQKYDNLKYLGTHIQGDSVSYQKLQIRTDKLRTLNDFQKLLGNINWIRPFLKLTTGELKPLFEILNPDSNPISTRKLTPEACKALQLMNERLSTARVKRLDLSQPWSLCILKTEYTPTACLWQDGVVEWIHLPHISPKVITPYDIFCTQLIIKGRHRSKELFSKDPDYIVVPYTKVQFDLLLQEKEDWPISLLGFLGEVHFHLPKDPLLTFTLQTAIIFPHMTSTTPLEKGIVIFTDGSANGRSVTYIQGREPIIKENTQNTAQQAEIVAVITAFEEVSQPFNLYTDSKYVTGLFPEIETATLSPRTKIYTELKHLQRLIHKRQEKFYIGHIRGHTGLPGPLAQGNAYADSLTRILTAAGKRTADGSEFEKRTADGSEFESPKKKAKVE

SEQ ID NO: 3257 - protein, 2116 aa, synthetic construct
  source 1..2116: note = Description of Artificial Sequence: Synthetic polypeptide
MPAAKRVKLDGGDKKYSIGLDIGTNSVGWAVITDEYKVPSKKFKVLGNTDRHSIKKNLIGALLFDSGETAEATRLKRTARRRYTRRKNRICYLQEIFSNEMAKVDDSFFHRLEESFLVEEDKKHERHPIFGNIVDEVAYHEKYPTIYHLRKKLVDSTDKADLRLIYLALAHMIKFRGHFLIEGDLNPDNSDVDKLFIQLVQTYNQLFEENPINASGVDAKAILSARLSKSRRLENLIAQLPGEKKNGLFGNLIALSLGLTPNFKSNFDLAEDAKLQLSKDTYDDDLDNLLAQIGDQYADLFLAAKNLSDAILLSDILRVNTEITKAPLSASMIKRYDEHHQDLTLLKALVRQQLPEKYKEIFFDQSKNGYAGYIDGGASQEEFYKFIKPILEKMDGTEELLVKLNREDLLRKQRTFDNGSIPHQIHLGELHAILRRQEDFYPFLKDNREKIEKILTFRIPYYVGPLARGNSRFAWMTRKSEETITPWNFEEVVDKGASAQSFIERMTNFDKNLPNEKVLPKHSLLYEYFTVYNELTKVKYVTEGMRKPAFLSGEQKKAIVDLLFKTNRKVTVKQLKEDYFKKIECFDSVEISGVEDRFNASLGTYHDLLKIIKDKDFLDNEENEDILEDIVLTLTLFEDREMIEERLKTYAHLFDDKVMKQLKRRRYTGWGRLSRKLINGIRDKQSGKTILDFLKSDGFANRNFMQLIHDDSLTFKEDIQKAQVSGQGDSLHEHIANLAGSPAIKKGILQTVKVVDELVKVMGRHKPENIVIEMARENQTTQKGQKNSRERMKRIEEGIKELGSQILKEHPVENTQLQNEKLYLYYLQNGRDMYVDQELDINRLSDYDVDHIVPQSFLKDDSIDNKVLTRSDKARGKSDNVPSEEVVKKMKNYWRQLLNAKLITQRKFDNLTKAERGGLSELDKAGFIKRQLVETRQITKHVAQILDSRMNTKYDENDKLIREVKVITLKSKLVSDFRKDFQFYKVREINNYHHAHDAYLNAVVGTALIKKYPKLESEFVYGDYKVYDVRKMIAKSEQEIGKATAKYFFYSNIMNFFKTEITLANGEIRKRPLIETNGETGEIVWDKGRDFATVRKVLSMPQVNIVKKTEVQTGGFSKESILPKRNSDKLIARKKDWDPKKYGGFDSPTVAYSVLVVAKVEKGKSKKLKSVKELLGITIMERSSFEKNPIDFLEAKGYKEVKKDLIIKLPKYSLFELENGRKRMLASAGELQKGNELALPSKYVNFLYLASHYEKLKGSPEDNEQKQLFVEQHKHYLDEIIEQISEFSKRVILADANLDKVLSAYNKHRDKPIREQAENIIHLFTLTNLGAPAAFKYFDTTIDRKRYTSTKEVLDATLIHQSITGLYETRIDLSQLGGDGGEAAAKPAPGGGGGVQEISDSRPMLHIYLNGRRFLGLLDTGADKTCIAGRDWPANWPIHQTESSLQGLGMACGVARSSQPLRWQHEDKSGIIHPFVIPTLPFTLWGRDIMKDIKVRLMTDSPDDSQDLMIGAIESNLFADQISWKSDQPVWLNQWPLKQEKLQALQQLVTEQLQLGHLEESNSPWNTPVFVIKKKSGKWRLLQDLRAVNATMHDMGALQPGLPSPVAVPKGWEIIIIDLQDCFFNIKLHPEDCKRFAFSVPSPNFKRPYQRFQWKVLPQGMKNSPTLCQKFVDKAILTVRDKYQDSYIVHYMDDILLAHPSRSIVDEILTSMIQALNKHGLVVSTEKIQKYDNLKYLGTHIQGDSVSYQKLQIRTDKLRTLNDFQKLLGNINWIRPFLKLTTGELKPLFEILNPDSNPISTRKLTPEACKALQLMNERLSTARVKRLDLSQPWSLCILKTEYTPTACLWQDGVVEWIHLPHISPKVITPYDIFCTQLIIKGRHRSKELFSKDPDYIVVPYTKVQFDLLLQEKEDWPISLLGFLGEVHFHLPKDPLLTFTLQTAIIFPHMTSTTPLEKGIVIFTDGSANGRSVTYIQGREPIIKENTQNTAQQAEIVAVITAFEEVSQPFNLYTDSKYVTGLFPEIETATLSPRTKIYTELKHLQRLIHKRQEKFYIGHIRGHTGLPGPLAQGNAYADSLTRILTAAGKRTADGSEFEKRTADGSEFESPKKKAKVE

SEQ ID NO: 3258 - protein, 2116 aa, synthetic construct
  source 1..2116: note = Description of Artificial Sequence: Synthetic polypeptide
MPAAKRVKLDGGDKKYSIGLDIGTNSVGWAVITDEYKVPSKKFKVLGNTDRHSIKKNLIGALLFDSGETAEATRLKRTARRRYTRRKNRICYLQEIFSNEMAKVDDSFFHRLEESFLVEEDKKHERHPIFGNIVDEVAYHEKYPTIYHLRKKLVDSTDKADLRLIYLALAHMIKFRGHFLIEGDLNPDNSDVDKLFIQLVQTYNQLFEENPINASGVDAKAILSARLSKSRRLENLIAQLPGEKKNGLFGNLIALSLGLTPNFKSNFDLAEDAKLQLSKDTYDDDLDNLLAQIGDQYADLFLAAKNLSDAILLSDILRVNTEITKAPLSASMIKRYDEHHQDLTLLKALVRQQLPEKYKEIFFDQSKNGYAGYIDGGASQEEFYKFIKPILEKMDGTEELLVKLNREDLLRKQRTFDNGSIPHQIHLGELHAILRRQEDFYPFLKDNREKIEKILTFRIPYYVGPLARGNSRFAWMTRKSEETITPWNFEEVVDKGASAQSFIERMTNFDKNLPNEKVLPKHSLLYEYFTVYNELTKVKYVTEGMRKPAFLSGEQKKAIVDLLFKTNRKVTVKQLKEDYFKKIECFDSVEISGVEDRFNASLGTYHDLLKIIKDKDFLDNEENEDILEDIVLTLTLFEDREMIEERLKTYAHLFDDKVMKQLKRRRYTGWGRLSRKLINGIRDKQSGKTILDFLKSDGFANRNFMQLIHDDSLTFKEDIQKAQVSGQGDSLHEHIANLAGSPAIKKGILQTVKVVDELVKVMGRHKPENIVIEMARENQTTQKGQKNSRERMKRIEEGIKELGSQILKEHPVENTQLQNEKLYLYYLQNGRDMYVDQELDINRLSDYDVDHIVPQSFLKDDSIDNKVLTRSDKARGKSDNVPSEEVVKKMKNYWRQLLNAKLITQRKFDNLTKAERGGLSELDKAGFIKRQLVETRQITKHVAQILDSRMNTKYDENDKLIREVKVITLKSKLVSDFRKDFQFYKVREINNYHHAHDAYLNAVVGTALIKKYPKLESEFVYGDYKVYDVRKMIAKSEQEIGKATAKYFFYSNIMNFFKTEITLANGEIRKRPLIETNGETGEIVWDKGRDFATVRKVLSMPQVNIVKKTEVQTGGFSKESILPKRNSDKLIARKKDWDPKKYGGFDSPTVAYSVLVVAKVEKGKSKKLKSVKELLGITIMERSSFEKNPIDFLEAKGYKEVKKDLIIKLPKYSLFELENGRKRMLASAGELQKGNELALPSKYVNFLYLASHYEKLKGSPEDNEQKQLFVEQHKHYLDEIIEQISEFSKRVILADANLDKVLSAYNKHRDKPIREQAENIIHLFTLTNLGAPAAFKYFDTTIDRKRYTSTKEVLDATLIHQSITGLYETRIDLSQLGGDGGPAPGGSEAAAKGGVQEISDSRPMLHIYLNGRRFLGLLDTGADKTCIAGRDWPANWPIHQTESSLQGLGMACGVARSSQPLRWQHEDKSGIIHPFVIPTLPFTLWGRDIMKDIKVRLMTDSPDDSQDLMIGAIESNLFADQISWKSDQPVWLNQWPLKQEKLQALQQLVTEQLQLGHLEESNSPWNTPVFVIKKKSGKWRLLQDLRAVNATMHDMGALQPGLPSPVAVPKGWEIIIIDLQDCFFNIKLHPEDCKRFAFSVPSPNFKRPYQRFQWKVLPQGMKNSPTLCQKFVDKAILTVRDKYQDSYIVHYMDDILLAHPSRSIVDEILTSMIQALNKHGLVVSTEKIQKYDNLKYLGTHIQGDSVSYQKLQIRTDKLRTLNDFQKLLGNINWIRPFLKLTTGELKPLFEILNPDSNPISTRKLTPEACKALQLMNERLSTARVKRLDLSQPWSLCILKTEYTPTACLWQDGVVEWIHLPHISPKVITPYDIFCTQLIIKGRHRSKELFSKDPDYIVVPYTKVQFDLLLQEKEDWPISLLGFLGEVHFHLPKDPLLTFTLQTAIIFPHMTSTTPLEKGIVIFTDGSANGRSVTYIQGREPIIKENTQNTAQQAEIVAVITAFEEVSQPFNLYTDSKYVTGLFPEIETATLSPRTKIYTELKHLQRLIHKRQEKFYIGHIRGHTGLPGPLAQGNAYADSLTRILTAAGKRTADGSEFEKRTADGSEFESPKKKAKVE

SEQ ID NO: 3259 - protein, 2123 aa, synthetic construct
  source 1..2123: note = Description of Artificial Sequence: Synthetic polypeptide
MPAAKRVKLDGGDKKYSIGLDIGTNSVGWAVITDEYKVPSKKFKVLGNTDRHSIKKNLIGALLFDSGETAEATRLKRTARRRYTRRKNRICYLQEIFSNEMAKVDDSFFHRLEESFLVEEDKKHERHPIFGNIVDEVAYHEKYPTIYHLRKKLVDSTDKADLRLIYLALAHMIKFRGHFLIEGDLNPDNSDVDKLFIQLVQTYNQLFEENPINASGVDAKAILSARLSKSRRLENLIAQLPGEKKNGLFGNLIALSLGLTPNFKSNFDLAEDAKLQLSKDTYDDDLDNLLAQIGDQYADLFLAAKNLSDAILLSDILRVNTEITKAPLSASMIKRYDEHHQDLTLLKALVRQQLPEKYKEIFFDQSKNGYAGYIDGGASQEEFYKFIKPILEKMDGTEELLVKLNREDLLRKQRTFDNGSIPHQIHLGELHAILRRQEDFYPFLKDNREKIEKILTFRIPYYVGPLARGNSRFAWMTRKSEETITPWNFEEVVDKGASAQSFIERMTNFDKNLPNEKVLPKHSLLYEYFTVYNELTKVKYVTEGMRKPAFLSGEQKKAIVDLLFKTNRKVTVKQLKEDYFKKIECFDSVEISGVEDRFNASLGTYHDLLKIIKDKDFLDNEENEDILEDIVLTLTLFEDREMIEERLKTYAHLFDDKVMKQLKRRRYTGWGRLSRKLINGIRDKQSGKTILDFLKSDGFANRNFMQLIHDDSLTFKEDIQKAQVSGQGDSLHEHIANLAGSPAIKKGILQTVKVVDELVKVMGRHKPENIVIEMARENQTTQKGQKNSRERMKRIEEGIKELGSQILKEHPVENTQLQNEKLYLYYLQNGRDMYVDQELDINRLSDYDVDHIVPQSFLKDDSIDNKVLTRSDKARGKSDNVPSEEVVKKMKNYWRQLLNAKLITQRKFDNLTKAERGGLSELDKAGFIKRQLVETRQITKHVAQILDSRMNTKYDENDKLIREVKVITLKSKLVSDFRKDFQFYKVREINNYHHAHDAYLNAVVGTALIKKYPKLESEFVYGDYKVYDVRKMIAKSEQEIGKATAKYFFYSNIMNFFKTEITLANGEIRKRPLIETNGETGEIVWDKGRDFATVRKVLSMPQVNIVKKTEVQTGGFSKESILPKRNSDKLIARKKDWDPKKYGGFDSPTVAYSVLVVAKVEKGKSKKLKSVKELLGITIMERSSFEKNPIDFLEAKGYKEVKKDLIIKLPKYSLFELENGRKRMLASAGELQKGNELALPSKYVNFLYLASHYEKLKGSPEDNEQKQLFVEQHKHYLDEIIEQISEFSKRVILADANLDKVLSAYNKHRDKPIREQAENIIHLFTLTNLGAPAAFKYFDTTIDRKRYTSTKEVLDATLIHQSITGLYETRIDLSQLGGDGGGSSGSSGSSGSSGSSGSSGGVQEISDSRPMLHIYLNGRRFLGLLDTGADKTCIAGRDWPANWPIHQTESSLQGLGMACGVARSSQPLRWQHEDKSGIIHPFVIPTLPFTLWGRDIMKDIKVRLMTDSPDDSQDLMIGAIESNLFADQISWKSDQPVWLNQWPLKQEKLQALQQLVTEQLQLGHLEESNSPWNTPVFVIKKKSGKWRLLQDLRAVNATMHDMGALQPGLPSPVAVPKGWEIIIIDLQDCFFNIKLHPEDCKRFAFSVPSPNFKRPYQRFQWKVLPQGMKNSPTLCQKFVDKAILTVRDKYQDSYIVHYMDDILLAHPSRSIVDEILTSMIQALNKHGLVVSTEKIQKYDNLKYLGTHIQGDSVSYQKLQIRTDKLRTLNDFQKLLGNINWIRPFLKLTTGELKPLFEILNPDSNPISTRKLTPEACKALQLMNERLSTARVKRLDLSQPWSLCILKTEYTPTACLWQDGVVEWIHLPHISPKVITPYDIFCTQLIIKGRHRSKELFSKDPDYIVVPYTKVQFDLLLQEKEDWPISLLGFLGEVHFHLPKDPLLTFTLQTAIIFPHMTSTTPLEKGIVIFTDGSANGRSVTYIQGREPIIKENTQNTAQQAEIVAVITAFEEVSQPFNLYTDSKYVTGLFPEIETATLSPRTKIYTELKHLQRLIHKRQEKFYIGHIRGHTGLPGPLAQGNAYADSLTRILTAAGKRTADGSEFEKRTADGSEFESPKKKAKVE

SEQ ID NO: 3260 - protein, 2125 aa, synthetic construct; identical to SEQ ID NO: 3157
  source 1..2125: note = Description of Artificial Sequence: Synthetic polypeptide

SEQ ID NO: 3261 - protein, 2116 aa, synthetic construct
  source 1..2116: note = Description of Artificial Sequence: Synthetic polypeptide
MPAAKRVKLDGGDKKYSIGLDIGTNSVGWAVITDEYKVPSKKFKVLGNTDRHSIKKNLIGALLFDSGETAEATRLKRTARRRYTRRKNRICYLQEIFSNEMAKVDDSFFHRLEESFLVEEDKKHERHPIFGNIVDEVAYHEKYPTIYHLRKKLVDSTDKADLRLIYLALAHMIKFRGHFLIEGDLNPDNSDVDKLFIQLVQTYNQLFEENPINASGVDAKAILSARLSKSRRLENLIAQLPGEKKNGLFGNLIALSLGLTPNFKSNFDLAEDAKLQLSKDTYDDDLDNLLAQIGDQYADLFLAAKNLSDAILLSDILRVNTEITKAPLSASMIKRYDEHHQDLTLLKALVRQQLPEKYKEIFFDQSKNGYAGYIDGGASQEEFYKFIKPILEKMDGTEELLVKLNREDLLRKQRTFDNGSIPHQIHLGELHAILRRQEDFYPFLKDNREKIEKILTFRIPYYVGPLARGNSRFAWMTRKSEETITPWNFEEVVDKGASAQSFIERMTNFDKNLPNEKVLPKHSLLYEYFTVYNELTKVKYVTEGMRKPAFLSGEQKKAIVDLLFKTNRKVTVKQLKEDYFKKIECFDSVEISGVEDRFNASLGTYHDLLKIIKDKDFLDNEENEDILEDIVLTLTLFEDREMIEERLKTYAHLFDDKVMKQLKRRRYTGWGRLSRKLINGIRDKQSGKTILDFLKSDGFANRNFMQLIHDDSLTFKEDIQKAQVSGQGDSLHEHIANLAGSPAIKKGILQTVKVVDELVKVMGRHKPENIVIEMARENQTTQKGQKNSRERMKRIEEGIKELGSQILKEHPVENTQLQNEKLYLYYLQNGRDMYVDQELDINRLSDYDVDHIVPQSFLKDDSIDNKVLTRSDKARGKSDNVPSEEVVKKMKNYWRQLLNAKLITQRKFDNLTKAERGGLSELDKAGFIKRQLVETRQITKHVAQILDSRMNTKYDENDKLIREVKVITLKSKLVSDFRKDFQFYKVREINNYHHAHDAYLNAVVGTALIKKYPKLESEFVYGDYKVYDVRKMIAKSEQEIGKATAKYFFYSNIMNFFKTEITLANGEIRKRPLIETNGETGEIVWDKGRDFATVRKVLSMPQVNIVKKTEVQTGGFSKESILPKRNSDKLIARKKDWDPKKYGGFDSPTVAYSVLVVAKVEKGKSKKLKSVKELLGITIMERSSFEKNPIDFLEAKGYKEVKKDLIIKLPKYSLFELENGRKRMLASAGELQKGNELALPSKYVNFLYLASHYEKLKGSPEDNEQKQLFVEQHKHYLDEIIEQISEFSKRVILADANLDKVLSAYNKHRDKPIREQAENIIHLFTLTNLGAPAAFKYFDTTIDRKRYTSTKEVLDATLIHQSITGLYETRIDLSQLGGDGGGGSGSSEAAAKGGVQEISDSRPMLHIYLNGRRFLGLLDTGADKTCIAGRDWPANWPIHQTESSLQGLGMACGVARSSQPLRWQHEDKSGIIHPFVIPTLPFTLWGRDIMKDIKVRLMTDSPDDSQDLMIGAIESNLFADQISWKSDQPVWLNQWPLKQEKLQALQQLVTEQLQLGHLEESNSPWNTPVFVIKKKSGKWRLLQDLRAVNATMHDMGALQPGLPSPVAVPKGWEIIIIDLQDCFFNIKLHPEDCKRFAFSVPSPNFKRPYQRFQWKVLPQGMKNSPTLCQKFVDKAILTVRDKYQDSYIVHYMDDILLAHPSRSIVDEILTSMIQALNKHGLVVSTEKIQKYDNLKYLGTHIQGDSVSYQKLQIRTDKLRTLNDFQKLLGNINWIRPFLKLTTGELKPLFEILNGDSNPISTRKLTPEACKALQLMNERLSTARVKRLDLSQPWSLCILKTEYTPTACLWQDGVVEWIHLPHISPKVITPYDIFCTQLIIKGRHRSKELFSKDPDYIVVPYTKVQFDLLLQEKEDWPISLLGFLGEVHFHLPKDPLLTFTLQTAIIFPHMTSTTPLEKGIVIFTDGSANGRSVTYIQGREPIIKENTQNTAQQAEIVAVITAFEEVSQPFNLYTDSKYVTGLFPEIETATLSPRTKIYTELKHLQRLIHKRQEKFYIGHIRGHTGLPGPLAQGNAYADSLTRILTAAGKRTADGSEFEKRTADGSEFESPKKKAKVE

SEQ ID NO: 3262 - protein, 2114 aa, synthetic construct
  source 1..2114: note = Description of Artificial Sequence: Synthetic polypeptide
MPAAKRVKLDGGDKKYSIGLDIGTNSVGWAVITDEYKVPSKKFKVLGNTDRHSIKKNLIGALLFDSGETAEATRLKRTARRRYTRRKNRICYLQEIFSNEMAKVDDSFFHRLEESFLVEEDKKHERHPIFGNIVDEVAYHEKYPTIYHLRKKLVDSTDKADLRLIYLALAHMIKFRGHFLIEGDLNPDNSDVDKLFIQLVQTYNQLFEENPINASGVDAKAILSARLSKSRRLENLIAQLPGEKKNGLFGNLIALSLGLTPNFKSNFDLAEDAKLQLSKDTYDDDLDNLLAQIGDQYADLFLAAKNLSDAILLSDILRVNTEITKAPLSASMIKRYDEHHQDLTLLKALVRQQLPEKYKEIFFDQSKNGYAGYIDGGASQEEFYKFIKPILEKMDGTEELLVKLNREDLLRKQRTFDNGSIPHQIHLGELHAILRRQEDFYPFLKDNREKIEKILTFRIPYYVGPLARGNSRFAWMTRKSEETITPWNFEEVVDKGASAQSFIERMTNFDKNLPNEKVLPKHSLLYEYFTVYNELTKVKYVTEGMRKPAFLSGEQKKAIVDLLFKTNRKVTVKQLKEDYFKKIECFDSVEISGVEDRFNASLGTYHDLLKIIKDKDFLDNEENEDILEDIVLTLTLFEDREMIEERLKTYAHLFDDKVMKQLKRRRYTGWGRLSRKLINGIRDKQSGKTILDFLKSDGFANRNFMQLIHDDSLTFKEDIQKAQVSGQGDSLHEHIANLAGSPAIKKGILQTVKVVDELVKVMGRHKPENIVIEMARENQTTQKGQKNSRERMKRIEEGIKELGSQILKEHPVENTQLQNEKLYLYYLQNGRDMYVDQELDINRLSDYDVDHIVPQSFLKDDSIDNKVLTRSDKARGKSDNVPSEEVVKKMKNYWRQLLNAKLITQRKFDNLTKAERGGLSELDKAGFIKRQLVETRQITKHVAQILDSRMNTKYDENDKLIREVKVITLKSKLVSDFRKDFQFYKVREINNYHHAHDAYLNAVVGTALIKKYPKLESEFVYGDYKVYDVRKMIAKSEQEIGKATAKYFFYSNIMNFFKTEITLANGEIRKRPLIETNGETGEIVWDKGRDFATVRKVLSMPQVNIVKKTEVQTGGFSKESILPKRNSDKLIARKKDWDPKKYGGFDSPTVAYSVLVVAKVEKGKSKKLKSVKELLGITIMERSSFEKNPIDFLEAKGYKEVKKDLIIKLPKYSLFELENGRKRMLASAGELQKGNELALPSKYVNFLYLASHYEKLKGSPEDNEQKQLFVEQHKHYLDEIIEQISEFSKRVILADANLDKVLSAYNKHRDKPIREQAENIIHLFTLTNLGAPAAFKYFDTTIDRKRYTSTKEVLDATLIHQSITGLYETRIDLSQLGGDGGPAPAPAPAPGGVQEISDSRPMLHIYLNGRRFLGLLDTGADKTCIAGRDWPANWPIHQTESSLQGLGMACGVARSSQPLRWQHEDKSGIIHPFVIPTLPFTLWGRDIMKDIKVRLMTDSPDDSQDLMIGAIESNLFADQISWKSDQPVWLNQWPLKQEKLQALQQLVTEQLQLGHLEESNSPWNTPVFVIKKKSGKWRLLQDLRAVNATMHDMGALQPGLPSPVAVPKGWEIIIIDLQDCFFNIKLHPEDCKRFAFSVPSPNFKRPYQRFQWKVLPQGMKNSPTLCQKFVDKAILTVRDKYQDSYIVHYMDDILLAHPSRSIVDEILTSMIQALNKHGLVVSTEKIQKYDNLKYLGTHIQGDSVSYQKLQIRTDKLRTLNDFQKLLGNINWIRPFLKLTTGELKPLFEILNGDSNPISTRKLTPEACKALQLMNERLSTARVKRLDLSQPWSLCILKTEYTPTACLWQDGVVEWIHLPHISPKVITPYDIFCTQLIIKGRHRSKELFSKDPDYIVVPYTKVQFDLLLQEKEDWPISLLGFLGEVHFHLPKDPLLTFTLQTAIIFPHMTSTTPLEKGIVIFTDGSANGRSVTYIQGREPIIKENTQNTAQQAEIVAVITAFEEVSQPFNLYTDSKYVTGLFPEIETATLSPRTKIYTELKHLQRLIHKRQEKFYIGHIRGHTGLPGPLAQGNAYADSLTRILTAAGKRTADGSEFEKRTADGSEFESPKKKAKVE

SEQ ID NO: 3263 - protein, 2116 aa, synthetic construct; identical to SEQ ID NO: 3146
  source 1..2116: note = Description of Artificial Sequence: Synthetic polypeptide

SEQ ID NO: 3264 - protein, 2114 aa, synthetic construct
  source 1..2114: note = Description of Artificial Sequence: Synthetic polypeptide
MPAAKRVKLDGGDKKYSIGLDIGTNSVGWAVITDEYKVPSKKFKVLGNTDRHSIKKNLIGALLFDSGETAEATRLKRTARRRYTRRKNRICYLQEIFSNEMAKVDDSFFHRLEESFLVEEDKKHERHPIFGNIVDEVAYHEKYPTIYHLRKKLVDSTDKADLRLIYLALAHMIKFRGHFLIEGDLNPDNSDVDKLFIQLVQTYNQLFEENPINASGVDAKAILSARLSKSRRLENLIAQLPGEKKNGLFGNLIALSLGLTPNFKSNFDLAEDAKLQLSKDTYDDDLDNLLAQIGDQYADLFLAAKNLSDAILLSDILRVNTEITKAPLSASMIKRYDEHHQDLTLLKALVRQQLPEKYKEIFFDQSKNGYAGYIDGGASQEEFYKFIKPILEKMDGTEELLVKLNREDLLRKQRTFDNGSIPHQIHLGELHAILRRQEDFYPFLKDNREKIEKILTFRIPYYVGPLARGNSRFAWMTRKSEETITPWNFEEVVDKGASAQSFIERMTNFDKNLPNEKVLPKHSLLYEYFTVYNELTKVKYVTEGMRKPAFLSGEQKKAIVDLLFKTNRKVTVKQLKEDYFKKIECFDSVEISGVEDRFNASLGTYHDLLKIIKDKDFLDNEENEDILEDIVLTLTLFEDREMIEERLKTYAHLFDDKVMKQLKRRRYTGWGRLSRKLINGIRDKQSGKTILDFLKSDGFANRNFMQLIHDDSLTFKEDIQKAQVSGQGDSLHEHIANLAGSPAIKKGILQTVKVVDELVKVMGRHKPENIVIEMARENQTTQKGQKNSRERMKRIEEGIKELGSQILKEHPVENTQLQNEKLYLYYLQNGRDMYVDQELDINRLSDYDVDHIVPQSFLKDDSIDNKVLTRSDKARGKSDNVPSEEVVKKMKNYWRQLLNAKLITQRKFDNLTKAERGGLSELDKAGFIKRQLVETRQITKHVAQILDSRMNTKYDENDKLIREVKVITLKSKLVSDFRKDFQFYKVREINNYHHAHDAYLNAVVGTALIKKYPKLESEFVYGDYKVYDVRKMIAKSEQEIGKATAKYFFYSNIMNFFKTEITLANGEIRKRPLIETNGETGEIVWDKGRDFATVRKVLSMPQVNIVKKTEVQTGGFSKESILPKRNSDKLIARKKDWDPKKYGGFDSPTVAYSVLVVAKVEKGKSKKLKSVKELLGITIMERSSFEKNPIDFLEAKGYKEVKKDLIIKLPKYSLFELENGRKRMLASAGELQKGNELALPSKYVNFLYLASHYEKLKGSPEDNEQKQLFVEQHKHYLDEIIEQISEFSKRVILADANLDKVLSAYNKHRDKPIREQAENIIHLFTLTNLGAPAAFKYFDTTIDRKRYTSTKEVLDATLIHQSITGLYETRIDLSQLGGDGGGSSPAPGGGGGVQEISDSRPMLHIYLNGRRFLGLLDTGADKTCIAGRDWPANWPIHQTESSLQGLGMACGVARSSQPLRWQHEDKSGIIHPFVIPTLPFTLWGRDIMKDIKVRLMTDSPDDSQDLMIGAIESNLFADQISWKSDQPVWLNQWPLKQEKLQALQQLVTEQLQLGHLEESNSPWNTPVFVIKKKSGKWRLLQDLRAVNATMHDMGALQPGLPSPVAVPKGWEIIIIDLQDCFFNIKLHPEDCKRFAFSVPSPNFKRPYQRFQWKVLPQGMKNSPTLCQKFVDKAILTVRDKYQDSYIVHYMDDILLAHPSRSIVDEILTSMIQALNKHGLVVSTEKIQKYDNLKYLGTHIQGDSVSYQKLQIRTDKLRTLNDFQKLLGNINWIRPFLKLTTGELKPLFEILNGDSNPISTRKLTPEACKALQLMNERLSTARVKRLDLSQPWSLCILKTEYTPTACLWQDGVVEWIHLPHISPKVITPYDIFCTQLIIKGRHRSKELFSKDPDYIVVPYTKVQFDLLLQEKEDWPISLLGFLGEVHFHLPKDPLLTFTLQTAIIFPHMTSTTPLEKGIVIFTDGSANGRSVTYIQGREPIIKENTQNTAQQAEIVAVITAFEEVSQPFNLYTDSKYVTGLFPEIETATLSPRTKIYTELKHLQRLIHKRQEKFYIGHIRGHTGLPGPLAQGNAYADSLTRILTAAGKRTADGSEFEKRTADGSEFESPKKKAKVE

SEQ ID NO: 3265 - protein, 2116 aa, synthetic construct
  source 1..2116: note = Description of Artificial Sequence: Synthetic polypeptide
MPAAKRVKLDGGDKKYSIGLDIGTNSVGWAVITDEYKVPSKKFKVLGNTDRHSIKKNLIGALLFDSGETAEATRLKRTARRRYTRRKNRICYLQEIFSNEMAKVDDSFFHRLEESFLVEEDKKHERHPIFGNIVDEVAYHEKYPTIYHLRKKLVDSTDKADLRLIYLALAHMIKFRGHFLIEGDLNPDNSDVDKLFIQLVQTYNQLFEENPINASGVDAKAILSARLSKSRRLENLIAQLPGEKKNGLFGNLIALSLGLTPNFKSNFDLAEDAKLQLSKDTYDDDLDNLLAQIGDQYADLFLAAKNLSDAILLSDILRVNTEITKAPLSASMIKRYDEHHQDLTLLKALVRQQLPEKYKEIFFDQSKNGYAGYIDGGASQEEFYKFIKPILEKMDGTEELLVKLNREDLLRKQRTFDNGSIPHQIHLGELHAILRRQEDFYPFLKDNREKIEKILTFRIPYYVGPLARGNSRFAWMTRKSEETITPWNFEEVVDKGASAQSFIERMTNFDKNLPNEKVLPKHSLLYEYFTVYNELTKVKYVTEGMRKPAFLSGEQKKAIVDLLFKTNRKVTVKQLKEDYFKKIECFDSVEISGVEDRFNASLGTYHDLLKIIKDKDFLDNEENEDILEDIVLTLTLFEDREMIEERLKTYAHLFDDKVMKQLKRRRYTGWGRLSRKLINGIRDKQSGKTILDFLKSDGFANRNFMQLIHDDSLTFKEDIQKAQVSGQGDSLHEHIANLAGSPAIKKGILQTVKVVDELVKVMGRHKPENIVIEMARENQTTQKGQKNSRERMKRIEEGIKELGSQILKEHPVENTQLQNEKLYLYYLQNGRDMYVDQELDINRLSDYDVDHIVPQSFLKDDSIDNKVLTRSDKARGKSDNVPSEEVVKKMKNYWRQLLNAKLITQRKFDNLTKAERGGLSELDKAGFIKRQLVETRQITKHVAQILDSRMNTKYDENDKLIREVKVITLKSKLVSDFRKDFQFYKVREINNYHHAHDAYLNAVVGTALIKKYPKLESEFVYGDYKVYDVRKMIAKSEQEIGKATAKYFFYSNIMNFFKTEITLANGEIRKRPLIETNGETGEIVWDKGRDFATVRKVLSMPQVNIVKKTEVQTGGFSKESILPKRNSDKLIARKKDWDPKKYGGFDSPTVAYSVLVVAKVEKGKSKKLKSVKELLGITIMERSSFEKNPIDFLEAKGYKEVKKDLIIKLPKYSLFELENGRKRMLASAGELQKGNELALPSKYVNFLYLASHYEKLKGSPEDNEQKQLFVEQHKHYLDEIIEQISEFSKRVILADANLDKVLSAYNKHRDKPIREQAENIIHLFTLTNLGAPAAFKYFDTTIDRKRYTSTKEVLDATLIHQSITGLYETRIDLSQLGGDGGGSSEAAAKPAPGGVQEISDSRPMLHIYLNGRRFLGLLDTGADKTCIAGRDWPANWPIHQTESSLQGLGMACGVARSSQPLRWQHEDKSGIIHPFVIPTLPFTLWGRDIMKDIKVRLMTDSPDDSQDLMIGAIESNLFADQISWKSDQPVWLNQWPLKQEKLQALQQLVTEQLQLGHLEESNSPWNTPVFVIKKKSGKWRLLQDLRAVNATMHDMGALQPGLPSPVAVPKGWEIIIIDLQDCFFNIKLHPEDCKRFAFSVPSPNFKRPYQRFQWKVLPQGMKNSPTLCQKFVDKAILTVRDKYQDSYIVHYMDDILLAHPSRSIVDEILTSMIQALNKHGLVVSTEKIQKYDNLKYLGTHIQGDSVSYQKLQIRTDKLRTLNDFQKLLGNINWIRPFLKLTTGELKPLFEILNGDSNPISTRKLTPEACKALQLMNERLSTARVKRLDLSQPWSLCILKTEYTPTACLWQDGVVEWIHLPHISPKVITPYDIFCTQLIIKGRHRSKELFSKDPDYIVVPYTKVQFDLLLQEKEDWPISLLGFLGEVHFHLPKDPLLTFTLQTAIIFPHMTSTTPLEKGIVIFTDGSANGRSVTYIQGREPIIKENTQNTAQQAEIVAVITAFEEVSQPFNLYTDSKYVTGLFPEIETATLSPRTKIYTELKHLQRLIHKRQEKFYIGHIRGHTGLPGPLAQGNAYADSLTRILTAAGKRTADGSEFEKRTADGSEFESPKKKAKVE

SEQ ID NO: 3266 - protein, 2120 aa, synthetic construct
  source 1..2120: note = Description of Artificial Sequence: Synthetic polypeptide
MPAAKRVKLDGGDKKYSIGLDIGTNSVGWAVITDEYKVPSKKFKVLGNTDRHSIKKNLIGALLFDSGETAEATRLKRTARRRYTRRKNRICYLQEIFSNEMAKVDDSFFHRLEESFLVEEDKKHERHPIFGNIVDEVAYHEKYPTIYHLRKKLVDSTDKADLRLIYLALAHMIKFRGHFLIEGDLNPDNSDVDKLFIQLVQTYNQLFEENPINASGVDAKAILSARLSKSRRLENLIAQLPGEKKNGLFGNLIALSLGLTPNFKSNFDLAEDAKLQLSKDTYDDDLDNLLAQIGDQYADLFLAAKNLSDAILLSDILRVNTEITKAPLSASMIKRYDEHHQDLTLLKALVRQQLPEKYKEIFFDQSKNGYAGYIDGGASQEEFYKFIKPILEKMDGTEELLVKLNREDLLRKQRTFDNGSIPHQIHLGELHAILRRQEDFYPFLKDNREKIEKILTFRIPYYVGPLARGNSRFAWMTRKSEETITPWNFEEVVDKGASAQSFIERMTNFDKNLPNEKVLPKHSLLYEYFTVYNELTKVKYVTEGMRKPAFLSGEQKKAIVDLLFKTNRKVTVKQLKEDYFKKIECFDSVEISGVEDRFNASLGTYHDLLKIIKDKDFLDNEENEDILEDIVLTLTLFEDREMIEERLKTYAHLFDDKVMKQLKRRRYTGWGRLSRKLINGIRDKQSGKTILDFLKSDGFANRNFMQLIHDDSLTFKEDIQKAQVSGQGDSLHEHIANLAGSPAIKKGILQTVKVVDELVKVMGRHKPENIVIEMARENQTTQKGQKNSRERMKRIEEGIKELGSQILKEHPVENTQLQNEKLYLYYLQNGRDMYVDQELDINRLSDYDVDHIVPQSFLKDDSIDNKVLTRSDKARGKSDNVPSEEVVKKMKNYWRQLLNAKLITQRKFDNLTKAERGGLSELDKAGFIKRQLVETRQITKHVAQILDSRMNTKYDENDKLIREVKVITLKSKLVSDFRKDFQFYKVREINNYHHAHDAYLNAVVGTALIKKYPKLESEFVYGDYKVYDVRKMIAKSEQEIGKATAKYFFYSNIMNFFKTEITLANGEIRKRPLIETNGETGEIVWDKGRDFATVRKVLSMPQVNIVKKTEVQTGGFSKESILPKRNSDKLIARKKDWDPKKYGGFDSPTVAYSVLVVAKVEKGKSKKLKSVKELLGITIMERSSFEKNPIDFLEAKGYKEVKKDLIIKLPKYSLFELENGRKRMLASAGELQKGNELALPSKYVNFLYLASHYEKLKGSPEDNEQKQLFVEQHKHYLDEIIEQISEFSKRVILADANLDKVLSAYNKHRDKPIREQAENIIHLFTLTNLGAPAAFKYFDTTIDRKRYTSTKEVLDATLIHQSITGLYETRIDLSQLGGDGGGGSGGSGGSGGSGGSGGWVQEISDSRPMLHIYLNGRRFLGLLNTGADKTCIAGRDWPANWPIHQTESSLQGLGMACGVARSSQPLRWQHEDKSGIIHPFVIPTLPFTLWGRDIMKDIKVRLMTDSPDDSQDLMIGAIESNLFADQISWKSDQPVWLNQWPLKQEKLQALQQLVTEQLQLGHLEESNSPWNTPVFVIKKKSGKWRLLQDLRAVNATMHDMGALQPGLPSPVAVPKGWEIIIIDLQDCFFNIKLHPEDCKRFAFSVPSPNFKRPYQRFQWKVLPQGMKNSPTLCQKFVDKAILTVRDKYQDSYIVHYMDDILLAHPSRSIVDEILTSMIQALNKHGLVVSTEKIQKYDNLKYLGTHIQGDSVSYQKLQIRTDKLRTLNDFQKLLGNINWIRPFLKLTTGELKPLFEILNGDSNPISTRKLTPEACKALQLMNERLSTARVKRLDLSQPWSLCILKTEYTPTACLWQDGVVEWIHLPHISPKVITPYDIFCTQLIIKGRHRSKELFSKDPDYIVVPYTKVQFDLLLQEKEDWPISLLGFLGEVHFHLPKDPLLTFTLQTAIIFPHMTSTTPLEKGIVIFTDGSANGRSVTYIQGREPIIKENTQNTAQQAEIVAVITAFEEVSQPFNLYTDSKYVTGLFPEIETATLSPRTKIYTELKHLQRLIHKRQEKFYIGHIRGHTGLPGPLAQGNAYADSLTRILTAGKRTADGSEFEKRTADGSEFESPKKKAKVE

SEQ ID NO: 3267 - protein, 2151 aa, synthetic construct
  source 1..2151: note = Description of Artificial Sequence: Synthetic polypeptide
MPAAKRVKLDGGDKKYSIGLDIGTNSVGWAVITDEYKVPSKKFKVLGNTDRHSIKKNLIGALLFDSGETAEATRLKRTARRRYTRRKNRICYLQEIFSNEMAKVDDSFFHRLEESFLVEEDKKHERHPIFGNIVDEVAYHEKYPTIYHLRKKLVDSTDKADLRLIYLALAHMIKFRGHFLIEGDLNPDNSDVDKLFIQLVQTYNQLFEENPINASGVDAKAILSARLSKSRRLENLIAQLPGEKKNGLFGNLIALSLGLTPNFKSNFDLAEDAKLQLSKDTYDDDLDNLLAQIGDQYADLFLAAKNLSDAILLSDILRVNTEITKAPLSASMIKRYDEHHQDLTLLKALVRQQLPEKYKEIFFDQSKNGYAGYIDGGASQEEFYKFIKPILEKMDGTEELLVKLNREDLLRKQRTFDNGSIPHQIHLGELHAILRRQEDFYPFLKDNREKIEKILTFRIPYYVGPLARGNSRFAWMTRKSEETITPWNFEEVVDKGASAQSFIERMTNFDKNLPNEKVLPKHSLLYEYFTVYNELTKVKYVTEGMRKPAFLSGEQKKAIVDLLFKTNRKVTVKQLKEDYFKKIECFDSVEISGVEDRFNASLGTYHDLLKIIKDKDFLDNEENEDILEDIVLTLTLFEDREMIEERLKTYAHLFDDKVMKQLKRRRYTGWGRLSRKLINGIRDKQSGKTILDFLKSDGFANRNFMQLIHDDSLTFKEDIQKAQVSGQGDSLHEHIANLAGSPAIKKGILQTVKVVDELVKVMGRHKPENIVIEMARENQTTQKGQKNSRERMKRIEEGIKELGSQILKEHPVENTQLQNEKLYLYYLQNGRDMYVDQELDINRLSDYDVDHIVPQSFLKDDSIDNKVLTRSDKARGKSDNVPSEEVVKKMKNYWRQLLNAKLITQRKFDNLTKAERGGLSELDKAGFIKRQLVETRQITKHVAQILDSRMNTKYDENDKLIREVKVITLKSKLVSDFRKDFQFYKVREINNYHHAHDAYLNAVVGTALIKKYPKLESEFVYGDYKVYDVRKMIAKSEQEIGKATAKYFFYSNIMNFFKTEITLANGEIRKRPLIETNGETGEIVWDKGRDFATVRKVLSMPQVNIVKKTEVQTGGFSKESILPKRNSDKLIARKKDWDPKKYGGFDSPTVAYSVLVVAKVEKGKSKKLKSVKELLGITIMERSSFEKNPIDFLEAKGYKEVKKDLIIKLPKYSLFELENGRKRMLASAGELQKGNELALPSKYVNFLYLASHYEKLKGSPEDNEQKQLFVEQHKHYLDEIIEQISEFSKRVILADANLDKVLSAYNKHRDKPIREQAENIIHLFTLTNLGAPAAFKYFDTTIDRKRYTSTKEVLDATLIHQSITGLYETRIDLSQLGGDGGAEAAAKEAAAKEAAAKEAAAKALEAEAAAKEAAAKEAAAKEAAAKAGGWVQEISDSRPMLHIYLNGRRFLGLLNTGADKTCIAGRDWPANWPIHQTESSLQGLGMACGVARSSQPLRWQHEDKSGIIHPFVIPTLPFTLWGRDIMKDIKVRLMTDSPDDSQDLMIGAIESNLFADQISWKSDQPVWLNQWPLKQEKLQALQQLVTEQLQLGHLEESNSPWNTPVFVIKKKSGKWRLLQDLRAVNATMHDMGALQPGLPSPVAVPKGWEIIIIDLQDCFFNIKLHPEDCKRFAFSVPSPNFKRPYQRFQWKVLPQGMKNSPTLCQKFVDKAILTVRDKYQDSYIVHYMDDILLAHPSRSIVDEILTSMIQALNKHGLVVSTEKIQKYDNLKYLGTHIQGDSVSYQKLQIRTDKLRTLNDFQKLLGNINWIRPFLKLTTGELKPLFEILNGDSNPISTRKLTPEACKALQLMNERLSTARVKRLDLSQPWSLCILKTEYTPTACLWQDGVVEWIHLPHISPKVITPYDIFCTQLIIKGRHRSKELFSKDPDYIVVPYTKVQFDLLLQEKEDWPISLLGFLGEVHFHLPKDPLLTFTLQTAIIFPHMTSTTPLEKGIVIFTDGSANGRSVTYIQGREPIIKENTQNTAQQAEIVAVITAFEEVSQPFNLYTDSKYVTGLFPEIETATLSPRTKIYTELKHLQRLIHKRQEKFYIGHIRGHTGLPGPLAQGNAYADSLTRILTAGKRTADGSEFEKRTADGSEFESPKKKAKVE

SEQ ID NO: 3268 - protein, 2135 aa, synthetic construct; identical to SEQ ID NO: 3172
  source 1..2135: note = Description of Artificial Sequence: Synthetic polypeptide

SEQ ID NO: 3269 - protein, 2114 aa, synthetic construct
  source 1..2114: note = Description of Artificial Sequence: Synthetic polypeptide
MPAAKRVKLDGGDKKYSIGLDIGTNSVGWAVITDEYKVPSKKFKVLGNTDRHSIKKNLIGALLFDSGETAEATRLKRTARRRYTRRKNRICYLQEIFSNEMAKVDDSFFHRLEESFLVEEDKKHERHPIFGNIVDEVAYHEKYPTIYHLRKKLVDSTDKADLRLIYLALAHMIKFRGHFLIEGDLNPDNSDVDKLFIQLVQTYNQLFEENPINASGVDAKAILSARLSKSRRLENLIAQLPGEKKNGLFGNLIALSLGLTPNFKSNFDLAEDAKLQLSKDTYDDDLDNLLAQIGDQYADLFLAAKNLSDAILLSDILRVNTEITKAPLSASMIKRYDEHHQDLTLLKALVRQQLPEKYKEIFFDQSKNGYAGYIDGGASQEEFYKFIKPILEKMDGTEELLVKLNREDLLRKQRTFDNGSIPHQIHLGELHAILRRQEDFYPFLKDNREKIEKILTFRIPYYVGPLARGNSRFAWMTRKSEETITPWNFEEVVDKGASAQSFIERMTNFDKNLPNEKVLPKHSLLYEYFTVYNELTKVKYVTEGMRKPAFLSGEQKKAIVDLLFKTNRKVTVKQLKEDYFKKIECFDSVEISGVEDRFNASLGTYHDLLKIIKDKDFLDNEENEDILEDIVLTLTLFEDREMIEERLKTYAHLFDDKVMKQLKRRRYTGWGRLSRKLINGIRDKQSGKTILDFLKSDGFANRNFMQLIHDDSLTFKEDIQKAQVSGQGDSLHEHIANLAGSPAIKKGILQTVKVVDELVKVMGRHKPENIVIEMARENQTTQKGQKNSRERMKRIEEGIKELGSQILKEHPVENTQLQNEKLYLYYLQNGRDMYVDQELDINRLSDYDVDHIVPQSFLKDDSIDNKVLTRSDKARGKSDNVPSEEVVKKMKNYWRQLLNAKLITQRKFDNLTKAERGGLSELDKAGFIKRQLVETRQITKHVAQILDSRMNTKYDENDKLIREVKVITLKSKLVSDFRKDFQFYKVREINNYHHAHDAYLNAVVGTALIKKYPKLESEFVYGDYKVYDVRKMIAKSEQEIGKATAKYFFYSNIMNFFKTEITLANGEIRKRPLIETNGETGEIVWDKGRDFATVRKVLSMPQVNIVKKTEVQTGGFSKESILPKRNSDKLIARKKDWDPKKYGGFDSPTVAYSVLVVAKVEKGKSKKLKSVKELLGITIMERSSFEKNPIDFLEAKGYKEVKKDLIIKLPKYSLFELENGRKRMLASAGELQKGNELALPSKYVNFLYLASHYEKLKGSPEDNEQKQLFVEQHKHYLDEIIEQISEFSKRVILADANLDKVLSAYNKHRDKPIREQAENIIHLFTLTNLGAPAAFKYFDTTIDRKRYTSTKEVLDATLIHQSITGLYETRIDLSQLGGDGGGGSGGGGSSGGWVQEISDSRPMLHIYLNGRRFLGLLNTGADKTCIAGRDWPANWPIHQTESSLQGLGMACGVARSSQPLRWQHEDKSGIIHPFVIPTLPFTLWGRDIMKDIKVRLMTDSPDDSQDLMIGAIESNLFADQISWKSDQPVWLNQWPLKQEKLQALQQLVTEQLQLGHLEESNSPWNTPVFVIKKKSGKWRLLQDLRAVNATMHDMGALQPGLPSPVAVPKGWEIIIIDLQDCFFNIKLHPEDCKRFAFSVPSPNFKRPYQRFQWKVLPQGMKNSPTLCQKFVDKAILTVRDKYQDSYIVHYMDDILLAHPSRSIVDEILTSMIQALNKHGLVVSTEKIQKYDNLKYLGTHIQGDSVSYQKLQIRTDKLRTLNDFQKLLGNINWIRPFLKLTTGELKPLFEILNGDSNPISTRKLTPEACKALQLMNERLSTARVKRLDLSQPWSLCILKTEYTPTACLWQDGVVEWIHLPHISPKVITPYDIFCTQLIIKGRHRSKELFSKDPDYIVVPYTKVQFDLLLQEKEDWPISLLGFLGEVHFHLPKDPLLTFTLQTAIIFPHMTSTTPLEKGIVIFTDGSANGRSVTYIQGREPIIKENTQNTAQQAEIVAVITAFEEVSQPFNLYTDSKYVTGLFPEIETATLSPRTKIYTELKHLQRLIHKRQEKFYIGHIRGHTGLPGPLAQGNAYADSLTRILTAGKRTADGSEFEKRTADGSEFESPKKKAKVE

SEQ ID NO: 3270 - protein, 2116 aa, synthetic construct; identical to SEQ ID NO: 3181
  source 1..2116: note = Description of Artificial Sequence: Synthetic polypeptide

SEQ ID NO: 3271 - protein, 2116 aa, synthetic construct
  source 1..2116: note = Description of Artificial Sequence: Synthetic polypeptide
MPAAKRVKLDGGDKKYSIGLDIGTNSVGWAVITDEYKVPSKKFKVLGNTDRHSIKKNLIGALLFDSGETAEATRLKRTARRRYTRRKNRICYLQEIFSNEMAKVDDSFFHRLEESFLVEEDKKHERHPIFGNIVDEVAYHEKYPTIYHLRKKLVDSTDKADLRLIYLALAHMIKFRGHFLIEGDLNPDNSDVDKLFIQLVQTYNQLFEENPINASGVDAKAILSARLSKSRRLENLIAQLPGEKKNGLFGNLIALSLGLTPNFKSNFDLAEDAKLQLSKDTYDDDLDNLLAQIGDQYADLFLAAKNLSDAILLSDILRVNTEITKAPLSASMIKRYDEHHQDLTLLKALVRQQLPEKYKEIFFDQSKNGYAGYIDGGASQEEFYKFIKPILEKMDGTEELLVKLNREDLLRKQRTFDNGSIPHQIHLGELHAILRRQEDFYPFLKDNREKIEKILTFRIPYYVGPLARGNSRFAWMTRKSEETITPWNFEEVVDKGASAQSFIERMTNFDKNLPNEKVLPKHSLLYEYFTVYNELTKVKYVTEGMRKPAFLSGEQKKAIVDLLFKTNRKVTVKQLKEDYFKKIECFDSVEISGVEDRFNASLGTYHDLLKIIKDKDFLDNEENEDILEDIVLTLTLFEDREMIEERLKTYAHLFDDKVMKQLKRRRYTGWGRLSRKLINGIRDKQSGKTILDFLKSDGFANRNFMQLIHDDSLTFKEDIQKAQVSGQGDSLHEHIANLAGSPAIKKGILQTVKVVDELVKVMGRHKPENIVIEMARENQTTQKGQKNSRERMKRIEEGIKELGSQILKEHPVENTQLQNEKLYLYYLQNGRDMYVDQELDINRLSDYDVDHIVPQSFLKDDSIDNKVLTRSDKARGKSDNVPSEEVVKKMKNYWRQLLNAKLITQRKFDNLTKAERGGLSELDKAGFIKRQLVETRQITKHVAQILDSRMNTKYDENDKLIREVKVITLKSKLVSDFRKDFQFYKVREINNYHHAHDAYLNAVVGTALIKKYPKLESEFVYGDYKVYDVRKMIAKSEQEIGKATAKYFFYSNIMNFFKTEITLANGEIRKRPLIETNGETGEIVWDKGRDFATVRKVLSMPQVNIVKKTEVQTGGFSKESILPKRNSDKLIARKKDWDPKKYGGFDSPTVAYSVLVVAKVEKGKSKKLKSVKELLGITIMERSSFEKNPIDFLEAKGYKEVKKDLIIKLPKYSLFELENGRKRMLASAGELQKGNELALPSKYVNFLYLASHYEKLKGSPEDNEQKQLFVEQHKHYLDEIIEQISEFSKRVILADANLDKVLSAYNKHRDKPIREQAENIIHLFTLTNLGAPAAFKYFDTTIDRKRYTSTKEVLDATLIHQSITGLYETRIDLSQLGGDGGEAAAKGSSGGGGGWVQEISDSRPMLHIYLNGRRFLGLLNTGADKTCIAGRDWPANWPIHQTESSLQGLGMACGVARSSQPLRWQHEDKSGIIHPFVIPTLPFTLWGRDIMKDIKVRLMTDSPDDSQDLMIGAIESNLFADQISWKSDQPVWLNQWPLKQEKLQALQQLVTEQLQLGHLEESNSPWNTPVFVIKKKSGKWRLLQDLRAVNATMHDMGALQPGLPSPVAVPKGWEIIIIDLQDCFFNIKLHPEDCKRFAFSVPSPNFKRPYQRFQWKVLPQGMKNSPTLCQKFVDKAILTVRDKYQDSYIVHYMDDILLAHPSRSIVDEILTSMIQALNKHGLVVSTEKIQKYDNLKYLGTHIQGDSVSYQKLQIRTDKLRTLNDFQKLLGNINWIRPFLKLTTGELKPLFEILNGDSNPISTRKLTPEACKALQLMNERLSTARVKRLDLSQPWSLCILKTEYTPTACLWQDGVVEWIHLPHISPKVITPYDIFCTQLIIKGRHRSKELFSKDPDYIVVPYTKVQFDLLLQEKEDWPISLLGFLGEVHFHLPKDPLLTFTLQTAIIFPHMTSTTPLEKGIVIFTDGSANGRSVTYIQGREPIIKENTQNTAQQAEIVAVITAFEEVSQPFNLYTDSKYVTGLFPEIETATLSPRTKIYTELKHLQRLIHKRQEKFYIGHIRGHTGLPGPLAQGNAYADSLTRILTAGKRTADGSEFEKRTADGSEFESPKKKAKVE

SEQ ID NO: 3272 - protein, 2114 aa, synthetic construct
  source 1..2114: note = Description of Artificial Sequence: Synthetic polypeptide
MPAAKRVKLDGGDKKYSIGLDIGTNSVGWAVITDEYKVPSKKFKVLGNTDRHSIKKNLIGALLFDSGETAEATRLKRTARRRYTRRKNRICYLQEIFSNEMAKVDDSFFHRLEESFLVEEDKKHERHPIFGNIVDEVAYHEKYPTIYHLRKKLVDSTDKADLRLIYLALAHMIKFRGHFLIEGDLNPDNSDVDKLFIQLVQTYNQLFEENPINASGVDAKAILSARLSKSRRLENLIAQLPGEKKNGLFGNLIALSLGLTPNFKSNFDLAEDAKLQLSKDTYDDDLDNLLAQIGDQYADLFLAAKNLSDAILLSDILRVNTEITKAPLSASMIKRYDEHHQDLTLLKALVRQQLPEKYKEIFFDQSKNGYAGYIDGGASQEEFYKFIKPILEKMDGTEELLVKLNREDLLRKQRTFDNGSIPHQIHLGELHAILRRQEDFYPFLKDNREKIEKILTFRIPYYVGPLARGNSRFAWMTRKSEETITPWNFEEVVDKGASAQSFIERMTNFDKNLPNEKVLPKHSLLYEYFTVYNELTKVKYVTEGMRKPAFLSGEQKKAIVDLLFKTNRKVTVKQLKEDYFKKIECFDSVEISGVEDRFNASLGTYHDLLKIIKDKDFLDNEENEDILEDIVLTLTLFEDREMIEERLKTYAHLFDDKVMKQLKRRRYTGWGRLSRKLINGIRDKQSGKTILDFLKSDGFANRNFMQLIHDDSLTFKEDIQKAQVSGQGDSLHEHIANLAGSPAIKKGILQTVKVVDELVKVMGRHKPENIVIEMARENQTTQKGQKNSRERMKRIEEGIKELGSQILKEHPVENTQLQNEKLYLYYLQNGRDMYVDQELDINRLSDYDVDHIVPQSFLKDDSIDNKVLTRSDKARGKSDNVPSEEVVKKMKNYWRQLLNAKLITQRKFDNLTKAERGGLSELDKAGFIKRQLVETRQITKHVAQILDSRMNTKYDENDKLIREVKVITLKSKLVSDFRKDFQFYKVREINNYHHAHDAYLNAVVGTALIKKYPKLESEFVYGDYKVYDVRKMIAKSEQEIGKATAKYFFYSNIMNFFKTEITLANGEIRKRPLIETNGETGEIVWDKGRDFATVRKVLSMPQVNIVKKTEVQTGGFSKESILPKRNSDKLIARKKDWDPKKYGGFDSPTVAYSVLVVAKVEKGKSKKLKSVKELLGITIMERSSFEKNPIDFLEAKGYKEVKKDLIIKLPKYSLFELENGRKRMLASAGELQKGNELALPSKYVNFLYLASHYEKLKGSPEDNEQKQLFVEQHKHYLDEIIEQISEFSKRVILADANLDKVLSAYNKHRDKPIREQAENIIHLFTLTNLGAPAAFKYFDTTIDRKRYTSTKEVLDATLIHQSITGLYETRIDLSQLGGDGGGGGGGSGSSGGWVQEISDSRPMLHIYLNGRRFLGLLNTGADKTCIAGRDWPANWPIHQTESSLQGLGMACGVARSSQPLRWQHEDKSGIIHPFVIPTLPFTLWGRDIMKDIKVRLMTDSPDDSQDLMIGAIESNLFADQISWKSDQPVWLNQWPLKQEKLQALQQLVTEQLQLGHLEESNSPWNTPVFVIKKKSGKWRLLQDLRAVNATMHDMGALQPGLPSPVAVPKGWEIIIIDLQDCFFNIKLHPEDCKRFAFSVPSPNFKRPYQRFQWKVLPQGMKNSPTLCQKFVDKAILTVRDKYQDSYIVHYMDDILLAHPSRSIVDEILTSMIQALNKHGLVVSTEKIQKYDNLKYLGTHIQGDSVSYQKLQIRTDKLRTLNDFQKLLGNINWIRPFLKLTTGELKPLFEILNGDSNPISTRKLTPEACKALQLMNERLSTARVKRLDLSQPWSLCILKTEYTPTACLWQDGVVEWIHLPHISPKVITPYDIFCTQLIIKGRHRSKELFSKDPDYIVVPYTKVQFDLLLQEKEDWPISLLGFLGEVHFHLPKDPLLTFTLQTAIIFPHMTSTTPLEKGIVIFTDGSANGRSVTYIQGREPIIKENTQNTAQQAEIVAVITAFEEVSQPFNLYTDSKYVTGLFPEIETATLSPRTKIYTELKHLQRLIHKRQEKFYIGHIRGHTGLPGPLAQGNAYADSLTRILTAGKRTADGSEFEKRTADGSEFESPKKKAKVE

SEQ ID NO: 3273 - protein, 2116 aa, synthetic construct
  source 1..2116: note = Description of Artificial Sequence: Synthetic polypeptide
MPAAKRVKLDGGDKKYSIGLDIGTNSVGWAVITDEYKVPSKKFKVLGNTDRHSIKKNLIGALLFDSGETAEATRLKRTARRRYTRRKNRICYLQEIFSNEMAKVDDSFFHRLEESFLVEEDKKHERHPIFGNIVDEVAYHEKYPTIYHLRKKLVDSTDKADLRLIYLALAHMIKFRGHFLIEGDLNPDNSDVDKLFIQLVQTYNQLFEENPINASGVDAKAILSARLSKSRRLENLIAQLPGEKKNGLFGNLIALSLGLTPNFKSNFDLAEDAKLQLSKDTYDDDLDNLLAQIGDQYADLFLAAKNLSDAILLSDILRVNTEITKAPLSASMIKRYDEHHQDLTLLKALVRQQLPEKYKEIFFDQSKNGYAGYIDGGASQEEFYKFIKPILEKMDGTEELLVKLNREDLLRKQRTFDNGSIPHQIHLGELHAILRRQEDFYPFLKDNREKIEKILTFRIPYYVGPLARGNSRFAWMTRKSEETITPWNFEEVVDKGASAQSFIERMTNFDKNLPNEKVLPKHSLLYEYFTVYNELTKVKYVTEGMRKPAFLSGEQKKAIVDLLFKTNRKVTVKQLKEDYFKKIECFDSVEISGVEDRFNASLGTYHDLLKIIKDKDFLDNEENEDILEDIVLTLTLFEDREMIEERLKTYAHLFDDKVMKQLKRRRYTGWGRLSRKLINGIRDKQSGKTILDFLKSDGFANRNFMQLIHDDSLTFKEDIQKAQVSGQGDSLHEHIANLAGSPAIKKGILQTVKVVDELVKVMGRHKPENIVIEMARENQTTQKGQKNSRERMKRIEEGIKELGSQILKEHPVENTQLQNEKLYLYYLQNGRDMYVDQELDINRLSDYDVDHIVPQSFLKDDSIDNKVLTRSDKARGKSDNVPSEEVVKKMKNYWRQLLNAKLITQRKFDNLTKAERGGLSELDKAGFIKRQLVETRQITKHVAQILDSRMNTKYDENDKLIREVKVITLKSKLVSDFRKDFQFYKVREINNYHHAHDAYLNAVVGTALIKKYPKLESEFVYGDYKVYDVRKMIAKSEQEIGKATAKYFFYSNIMNFFKTEITLANGEIRKRPLIETNGETGEIVWDKGRDFATVRKVLSMPQVNIVKKTEVQTGGFSKESILPKRNSDKLIARKKDWDPKKYGGFDSPTVAYSVLVVAKVEKGKSKKLKSVKELLGITIMERSSFEKNPIDFLEAKGYKEVKKDLIIKLPKYSLFELENGRKRMLASAGELQKGNELALPSKYVNFLYLASHYEKLKGSPEDNEQKQLFVEQHKHYLDEIIEQISEFSKRVILADANLDKVLSAYNKHRDKPIREQAENIIHLFTLTNLGAPAAFKYFDTTIDRKRYTSTKEVLDATLIHQSITGLYETRIDLSQLGGDGGEAAAKGGGPAPGGWVQEISDSRPMLHIYLNGRRFLGLLNTGADKTCIAGRDWPANWPIHQTESSLQGLGMACGVARSSQPLRWQHEDKSGIIHPFVIPTLPFTLWGRDIMKDIKVRLMTDSPDDSQDLMIGAIESNLFADQISWKSDQPVWLNQWPLKQEKLQALQQLVTEQLQLGHLEESNSPWNTPVFVIKKKSGKWRLLQDLRAVNATMHDMGALQPGLPSPVAVPKGWEIIIIDLQDCFFNIKLHPEDCKRFAFSVPSPNFKRPYQRFQWKVLPQGMKNSPTLCQKFVDKAILTVRDKYQDSYIVHYMDDILLAHPSRSIVDEILTSMIQALNKHGLVVSTEKIQKYDNLKYLGTHIQGDSVSYQKLQIRTDKLRTLNDFQKLLGNINWIRPFLKLTTGELKPLFEILNGDSNPISTRKLTPEACKALQLMNERLSTARVKRLDLSQPWSLCILKTEYTPTACLWQDGVVEWIHLPHISPKVITPYDIFCTQLIIKGRHRSKELFSKDPDYIVVPYTKVQFDLLLQEKEDWPISLLGFLGEVHFHLPKDPLLTFTLQTAIIFPHMTSTTPLEKGIVIFTDGSANGRSVTYIQGREPIIKENTQNTAQQAEIVAVITAFEEVSQPFNLYTDSKYVTGLFPEIETATLSPRTKIYTELKHLQRLIHKRQEKFYIGHIRGHTGLPGPLAQGNAYADSLTRILTAGKRTADGSEFEKRTADGSEFESPKKKAKVE

SEQ ID NO: 3274 - protein, 2116 aa, synthetic construct
  source 1..2116: note = Description of Artificial Sequence: Synthetic polypeptide
MPAAKRVKLDGGDKKYSIGLDIGTNSVGWAVITDEYKVPSKKFKVLGNTDRHSIKKNLIGALLFDSGETAEATRLKRTARRRYTRRKNRICYLQEIFSNEMAKVDDSFFHRLEESFLVEEDKKHERHPIFGNIVDEVAYHEKYPTIYHLRKKLVDSTDKADLRLIYLALAHMIKFRGHFLIEGDLNPDNSDVDKLFIQLVQTYNQLFEENPINASGVDAKAILSARLSKSRRLENLIAQLPGEKKNGLFGNLIALSLGLTPNFKSNFDLAEDAKLQLSKDTYDDDLDNLLAQIGDQYADLFLAAKNLSDAILLSDILRVNTEITKAPLSASMIKRYDEHHQDLTLLKALVRQQLPEKYKEIFFDQSKNGYAGYIDGGASQEEFYKFIKPILEKMDGTEELLVKLNREDLLRKQRTFDNGSIPHQIHLGELHAILRRQEDFYPFLKDNREKIEKILTFRIPYYVGPLARGNSRFAWMTRKSEETITPWNFEEVVDKGASAQSFIERMTNFDKNLPNEKVLPKHSLLYEYFTVYNELTKVKYVTEGMRKPAFLSGEQKKAIVDLLFKTNRKVTVKQLKEDYFKKIECFDSVEISGVEDRFNASLGTYHDLLKIIKDKDFLDNEENEDILEDIVLTLTLFEDREMIEERLKTYAHLFDDKVMKQLKRRRYTGWGRLSRKLINGIRDKQSGKTILDFLKSDGFANRNFMQLIHDDSLTFKEDIQKAQVSGQGDSLHEHIANLAGSPAIKKGILQTVKVVDELVKVMGRHKPENIVIEMARENQTTQKGQKNSRERMKRIEEGIKELGSQILKEHPVENTQLQNEKLYLYYLQNGRDMYVDQELDINRLSDYDVDHIVPQSFLKDDSIDNKVLTRSDKARGKSDNVPSEEVVKKMKNYWRQLLNAKLITQRKFDNLTKAERGGLSELDKAGFIKRQLVETRQITKHVAQILDSRMNTKYDENDKLIREVKVITLKSKLVSDFRKDFQFYKVREINNYHHAHDAYLNAVVGTALIKKYPKLESEFVYGDYKVYDVRKMIAKSEQEIGKATAKYFFYSNIMNFFKTEITLANGEIRKRPLIETNGETGEIVWDKGRDFATVRKVLSMPQVNIVKKTEVQTGGFSKESILPKRNSDKLIARKKDWDPKKYGGFDSPTVAYSVLVVAKVEKGKSKKLKSVKELLGITIMERSSFEKNPIDFLEAKGYKEVKKDLIIKLPKYSLFELENGRKRMLASAGELQKGNELALPSKYVNFLYLASHYEKLKGSPEDNEQKQLFVEQHKHYLDEIIEQISEFSKRVILADANLDKVLSAYNKHRDKPIREQAENIIHLFTLTNLGAPAAFKYFDTTIDRKRYTSTKEVLDATLIHQSITGLYETRIDLSQLGGDGGPAPEAAAKGGGGGWVQEISDSRPMLHIYLNGRRFLGLLNTGADKTCIAGRDWPANWPIHQTESSLQGLGMACGVARSSQPLRWQHEDKSGIIHPFVIPTLPFTLWGRDIMKDIKVRLMTDSPDDSQDLMIGAIESNLFADQISWKSDQPVWLNQWPLKQEKLQALQQLVTEQLQLGHLEESNSPWNTPVFVIKKKSGKWRLLQDLRAVNATMHDMGALQPGLPSPVAVPKGWEIIIIDLQDCFFNIKLHPEDCKRFAFSVPSPNFKRPYQRFQWKVLPQGMKNSPTLCQKFVDKAILTVRDKYQDSYIVHYMDDILLAHPSRSIVDEILTSMIQALNKHGLVVSTEKIQKYDNLKYLGTHIQGDSVSYQKLQIRTDKLRTLNDFQKLLGNINWIRPFLKLTTGELKPLFEILNGDSNPISTRKLTPEACKALQLMNERLSTARVKRLDLSQPWSLCILKTEYTPTACLWQDGVVEWIHLPHISPKVITPYDIFCTQLIIKGRHRSKELFSKDPDYIVVPYTKVQFDLLLQEKEDWPISLLGFLGEVHFHLPKDPLLTFTLQTAIIFPHMTSTTPLEKGIVIFTDGSANGRSVTYIQGREPIIKENTQNTAQQAEIVAVITAFEEVSQPFNLYTDSKYVTGLFPEIETATLSPRTKIYTELKHLQRLIHKRQEKFYIGHIRGHTGLPGPLAQGNAYADSLTRILTAGKRTADGSEFEKRTADGSEFESPKKKAKVE

SEQ ID NO: 3275 - protein, 2114 aa, synthetic construct
  source 1..2114: note = Description of Artificial Sequence: Synthetic polypeptide
MPAAKRVKLDGGDKKYSIGLDIGTNSVGWAVITDEYKVPSKKFKVLGNTDRHSIKKNLIGALLFDSGETAEATRLKRTARRRYTRRKNRICYLQEIFSNEMAKVDDSFFHRLEESFLVEEDKKHERHPIFGNIVDEVAYHEKYPTIYHLRKKLVDSTDKADLRLIYLALAHMIKFRGHFLIEGDLNPDNSDVDKLFIQLVQTYNQLFEENPINASGVDAKAILSARLSKSRRLENLIAQLPGEKKNGLFGNLIALSLGLTPNFKSNFDLAEDAKLQLSKDTYDDDLDNLLAQIGDQYADLFLAAKNLSDAILLSDILRVNTEITKAPLSASMIKRYDEHHQDLTLLKALVRQQLPEKYKEIFFDQSKNGYAGYIDGGASQEEFYKFIKPILEKMDGTEELLVKLNREDLLRKQRTFDNGSIPHQIHLGELHAILRRQEDFYPFLKDNREKIEKILTFRIPYYVGPLARGNSRFAWMTRKSEETITPWNFEEVVDKGASAQSFIERMTNFDKNLPNEKVLPKHSLLYEYFTVYNELTKVKYVTEGMRKPAFLSGEQKKAIVDLLFKTNRKVTVKQLKEDYFKKIECFDSVEISGVEDRFNASLGTYHDLLKIIKDKDFLDNEENEDILEDIVLTLTLFEDREMIEERLKTYAHLFDDKVMKQLKRRRYTGWGRLSRKLINGIRDKQSGKTILDFLKSDGFANRNFMQLIHDDSLTFKEDIQKAQVSGQGDSLHEHIANLAGSPAIKKGILQTVKVVDELVKVMGRHKPENIVIEMARENQTTQKGQKNSRERMKRIEEGIKELGSQILKEHPVENTQLQNEKLYLYYLQNGRDMYVDQELDINRLSDYDVDHIVPQSFLKDDSIDNKVLTRSDKARGKSDNVPSEEVVKKMKNYWRQLLNAKLITQRKFDNLTKAERGGLSELDKAGFIKRQLVETRQITKHVAQILDSRMNTKYDENDKLIREVKVITLKSKLVSDFRKDFQFYKVREINNYHHAHDAYLNAVVGTALIKKYPKLESEFVYGDYKVYDVRKMIAKSEQEIGKATAKYFFYSNIMNFFKTEITLANGEIRKRPLIETNGETGEIVWDKGRDFATVRKVLSMPQVNIVKKTEVQTGGFSKESILPKRNSDKLIARKKDWDPKKYGGFDSPTVAYSVLVVAKVEKGKSKKLKSVKELLGITIMERSSFEKNPIDFLEAKGYKEVKKDLIIKLPKYSLFELENGRKRMLASAGELQKGNELALPSKYVNFLYLASHYEKLKGSPEDNEQKQLFVEQHKHYLDEIIEQISEFSKRVILADANLDKVLSAYNKHRDKPIREQAENIIHLFTLTNLGAPAAFKYFDTTIDRKRYTSTKEVLDATLIHQSITGLYETRIDLSQLGGDGGGGGPAPGGSGGWVQEISDSRPMLHIYLNGRRFLGLLNTGADKTCIAGRDWPANWPIHQTESSLQGLGMACGVARSSQPLRWQHEDKSGIIHPFVIPTLPFTLWGRDIMKDIKVRLMTDSPDDSQDLMIGAIESNLFADQISWKSDQPVWLNQWPLKQEKLQALQQLVTEQLQLGHLEESNSPWNTPVFVIKKKSGKWRLLQDLRAVNATMHDMGALQPGLPSPVAVPKGWEIIIIDLQDCFFNIKLHPEDCKRFAFSVPSPNFKRPYQRFQWKVLPQGMKNSPTLCQKFVDKAILTVRDKYQDSYIVHYMDDILLAHPSRSIVDEILTSMIQALNKHGLVVSTEKIQKYDNLKYLGTHIQGDSVSYQKLQIRTDKLRTLNDFQKLLGNINWIRPFLKLTTGELKPLFEILNGDSNPISTRKLTPEACKALQLMNERLSTARVKRLDLSQPWSLCILKTEYTPTACLWQDGVVEWIHLPHISPKVITPYDIFCTQLIIKGRHRSKELFSKDPDYIVVPYTKVQFDLLLQEKEDWPISLLGFLGEVHFHLPKDPLLTFTLQTAIIFPHMTSTTPLEKGIVIFTDGSANGRSVTYIQGREPIIKENTQNTAQQAEIVAVITAFEEVSQPFNLYTDSKYVTGLFPEIETATLSPRTKIYTELKHLQRLIHKRQEKFYIGHIRGHTGLPGPLAQGNAYADSLTRILTAGKRTADGSEFEKRTADGSEFESPKKKAKVE

SEQ ID NO: 3276 - protein, 2114 aa, synthetic construct
  source 1..2114: note = Description of Artificial Sequence: Synthetic polypeptide
MPAAKRVKLDGGDKKYSIGLDIGTNSVGWAVITDEYKVPSKKFKVLGNTDRHSIKKNLIGALLFDSGETAEATRLKRTARRRYTRRKNRICYLQEIFSNEMAKVDDSFFHRLEESFLVEEDKKHERHPIFGNIVDEVAYHEKYPTIYHLRKKLVDSTDKADLRLIYLALAHMIKFRGHFLIEGDLNPDNSDVDKLFIQLVQTYNQLFEENPINASGVDAKAILSARLSKSRRLENLIAQLPGEKKNGLFGNLIALSLGLTPNFKSNFDLAEDAKLQLSKDTYDDDLDNLLAQIGDQYADLFLAAKNLSDAILLSDILRVNTEITKAPLSASMIKRYDEHHQDLTLLKALVRQQLPEKYKEIFFDQSKNGYAGYIDGGASQEEFYKFIKPILEKMDGTEELLVKLNREDLLRKQRTFDNGSIPHQIHLGELHAILRRQEDFYPFLKDNREKIEKILTFRIPYYVGPLARGNSRFAWMTRKSEETITPWNFEEVVDKGASAQSFIERMTNFDKNLPNEKVLPKHSLLYEYFTVYNELTKVKYVTEGMRKPAFLSGEQKKAIVDLLFKTNRKVTVKQLKEDYFKKIECFDSVEISGVEDRFNASLGTYHDLLKIIKDKDFLDNEENEDILEDIVLTLTLFEDREMIEERLKTYAHLFDDKVMKQLKRRRYTGWGRLSRKLINGIRDKQSGKTILDFLKSDGFANRNFMQLIHDDSLTFKEDIQKAQVSGQGDSLHEHIANLAGSPAIKKGILQTVKVVDELVKVMGRHKPENIVIEMARENQTTQKGQKNSRERMKRIEEGIKELGSQILKEHPVENTQLQNEKLYLYYLQNGRDMYVDQELDINRLSDYDVDHIVPQSFLKDDSIDNKVLTRSDKARGKSDNVPSEEVVKKMKNYWRQLLNAKLITQRKFDNLTKAERGGLSELDKAGFIKRQLVETRQITKHVAQILDSRMNTKYDENDKLIREVKVITLKSKLVSDFRKDFQFYKVREINNYHHAHDAYLNAVVGTALIKKYPKLESEFVYGDYKVYDVRKMIAKSEQEIGKATAKYFFYSNIMNFFKTEITLANGEIRKRPLIETNGETGEIVWDKGRDFATVRKVLSMPQVNIVKKTEVQTGGFSKESILPKRNSDKLIARKKDWDPKKYGGFDSPTVAYSVLVVAKVEKGKSKKLKSVKELLGITIMERSSFEKNPIDFLEAKGYKEVKKDLIIKLPKYSLFELENGRKRMLASAGELQKGNELALPSKYVNFLYLASHYEKLKGSPEDNEQKQLFVEQHKHYLDEIIEQISEFSKRVILADANLDKVLSAYNKHRDKPIREQAENIIHLFTLTNLGAPAAFKYFDTTIDRKRYTSTKEVLDATLIHQSITGLYETRIDLSQLGGDGGGGSGGGPAPGGWVQEISDSRPMLHIYLNGRRFLGLLNTGADKTCIAGRDWPANWPIHQTESSLQGLGMACGVARSSQPLRWQHEDKSGIIHPFVIPTLPFTLWGRDIMKDIKVRLMTDSPDDSQDLMIGAIESNLFADQISWKSDQPVWLNQWPLKQEKLQALQQLVTEQLQLGHLEESNSPWNTPVFVIKKKSGKWRLLQDLRAVNATMHDMGALQPGLPSPVAVPKGWEIIIIDLQDCFFNIKLHPEDCKRFAFSVPSPNFKRPYQRFQWKVLPQGMKNSPTLCQKFVDKAILTVRDKYQDSYIVHYMDDILLAHPSRSIVDEILTSMIQALNKHGLVVSTEKIQKYDNLKYLGTHIQGDSVSYQKLQIRTDKLRTLNDFQKLLGNINWIRPFLKLTTGELKPLFEILNGDSNPISTRKLTPEACKALQLMNERLSTARVKRLDLSQPWSLCILKTEYTPTACLWQDGVVEWIHLPHISPKVITPYDIFCTQLIIKGRHRSKELFSKDPDYIVVPYTKVQFDLLLQEKEDWPISLLGFLGEVHFHLPKDPLLTFTLQTAIIFPHMTSTTPLEKGIVIFTDGSANGRSVTYIQGREPIIKENTQNTAQQAEIVAVITAFEEVSQPFNLYTDSKYVTGLFPEIETATLSPRTKIYTELKHLQRLIHKRQEKFYIGHIRGHTGLPGPLAQGNAYADSLTRILTAGKRTADGSEFEKRTADGSEFESPKKKAKVE

SEQ ID NO: 3277 - protein, 2135 aa, synthetic construct; identical to SEQ ID NO: 3173
  source 1..2135: note = Description of Artificial Sequence: Synthetic polypeptide

SEQ ID NO: 3278 - protein, 2110 aa, synthetic construct
  source 1..2110: note = Description of Artificial Sequence: Synthetic polypeptide
MPAAKRVKLDGGDKKYSIGLDIGTNSVGWAVITDEYKVPSKKFKVLGNTDRHSIKKNLIGALLFDSGETAEATRLKRTARRRYTRRKNRICYLQEIFSNEMAKVDDSFFHRLEESFLVEEDKKHERHPIFGNIVDEVAYHEKYPTIYHLRKKLVDSTDKADLRLIYLALAHMIKFRGHFLIEGDLNPDNSDVDKLFIQLVQTYNQLFEENPINASGVDAKAILSARLSKSRRLENLIAQLPGEKKNGLFGNLIALSLGLTPNFKSNFDLAEDAKLQLSKDTYDDDLDNLLAQIGDQYADLFLAAKNLSDAILLSDILRVNTEITKAPLSASMIKRYDEHHQDLTLLKALVRQQLPEKYKEIFFDQSKNGYAGYIDGGASQEEFYKFIKPILEKMDGTEELLVKLNREDLLRKQRTFDNGSIPHQIHLGELHAILRRQEDFYPFLKDNREKIEKILTFRIPYYVGPLARGNSRFAWMTRKSEETITPWNFEEVVDKGASAQSFIERMTNFDKNLPNEKVLPKHSLLYEYFTVYNELTKVKYVTEGMRKPAFLSGEQKKAIVDLLFKTNRKVTVKQLKEDYFKKIECFDSVEISGVEDRFNASLGTYHDLLKIIKDKDFLDNEENEDILEDIVLTLTLFEDREMIEERLKTYAHLFDDKVMKQLKRRRYTGWGRLSRKLINGIRDKQSGKTILDFLKSDGFANRNFMQLIHDDSLTFKEDIQKAQVSGQGDSLHEHIANLAGSPAIKKGILQTVKVVDELVKVMGRHKPENIVIEMARENQTTQKGQKNSRERMKRIEEGIKELGSQILKEHPVENTQLQNEKLYLYYLQNGRDMYVDQELDINRLSDYDVDHIVPQSFLKDDSIDNKVLTRSDKARGKSDNVPSEEVVKKMKNYWRQLLNAKLITQRKFDNLTKAERGGLSELDKAGFIKRQLVETRQITKHVAQILDSRMNTKYDENDKLIREVKVITLKSKLVSDFRKDFQFYKVREINNYHHAHDAYLNAVVGTALIKKYPKLESEFVYGDYKVYDVRKMIAKSEQEIGKATAKYFFYSNIMNFFKTEITLANGEIRKRPLIETNGETGEIVWDKGRDFATVRKVLSMPQVNIVKKTEVQTGGFSKESILPKRNSDKLIARKKDWDPKKYGGFDSPTVAYSVLVVAKVEKGKSKKLKSVKELLGITIMERSSFEKNPIDFLEAKGYKEVKKDLIIKLPKYSLFELENGRKRMLASAGELQKGNELALPSKYVNFLYLASHYEKLKGSPEDNEQKQLFVEQHKHYLDEIIEQISEFSKRVILADANLDKVLSAYNKHRDKPIREQAENIIHLFTLTNLGAPAAFKYFDTTIDRKRYTSTKEVLDATLIHQSITGLYETRIDLSQLGGDGGEAAAKGGWVQEISDSRPMLHIYLNGRRFLGLLNTGADKTCIAGRDWPANWPIHQTESSLQGLGMACGVARSSQPLRWQHEDKSGIIHPFVIPTLPFTLWGRDIMKDIKVRLMTDSPDDSQDLMIGAIESNLFADQISWKSDQPVWLNQWPLKQEKLQALQQLVTEQLQLGHLEESNSPWNTPVFVIKKKSGKWRLLQDLRAVNATMHDMGALQPGLPSPVAVPKGWEIIIIDLQDCFFNIKLHPEDCKRFAFSVPSPNFKRPYQRFQWKVLPQGMKNSPTLCQKFVDKAILTVRDKYQDSYIVHYMDDILLAHPSRSIVDEILTSMIQALNKHGLVVSTEKIQKYDNLKYLGTHIQGDSVSYQKLQIRTDKLRTLNDFQKLLGNINWIRPFLKLTTGELKPLFEILNGDSNPISTRKLTPEACKALQLMNERLSTARVKRLDLSQPWSLCILKTEYTPTACLWQDGVVEWIHLPHISPKVITPYDIFCTQLIIKGRHRSKELFSKDPDYIVVPYTKVQFDLLLQEKEDWPISLLGFLGEVHFHLPKDPLLTFTLQTAIIFPHMTSTTPLEKGIVIFTDGSANGRSVTYIQGREPIIKENTQNTAQQAEIVAVITAFEEVSQPFNLYTDSKYVTGLFPEIETATLSPRTKIYTELKHLQRLIHKRQEKFYIGHIRGHTGLPGPLAQGNAYADSLTRILTAGKRTADGSEFEKRTADGSEFESPKKKAKVE

SEQ ID NO: 3279 - protein, 2116 aa, synthetic construct
  source 1..2116: note = Description of Artificial Sequence: Synthetic polypeptide
MPAAKRVKLDGGDKKYSIGLDIGTNSVGWAVITDEYKVPSKKFKVLGNTDRHSIKKNLIGALLFDSGETAEATRLKRTARRRYTRRKNRICYLQEIFSNEMAKVDDSFFHRLEESFLVEEDKKHERHPIFGNIVDEVAYHEKYPTIYHLRKKLVDSTDKADLRLIYLALAHMIKFRGHFLIEGDLNPDNSDVDKLFIQLVQTYNQLFEENPINASGVDAKAILSARLSKSRRLENLIAQLPGEKKNGLFGNLIALSLGLTPNFKSNFDLAEDAKLQLSKDTYDDDLDNLLAQIGDQYADLFLAAKNLSDAILLSDILRVNTEITKAPLSASMIKRYDEHHQDLTLLKALVRQQLPEKYKEIFFDQSKNGYAGYIDGGASQEEFYKFIKPILEKMDGTEELLVKLNREDLLRKQRTFDNGSIPHQIHLGELHAILRRQEDFYPFLKDNREKIEKILTFRIPYYVGPLARGNSRFAWMTRKSEETITPWNFEEVVDKGASAQSFIERMTNFDKNLPNEKVLPKHSLLYEYFTVYNELTKVKYVTEGMRKPAFLSGEQKKAIVDLLFKTNRKVTVKQLKEDYFKKIECFDSVEISGVEDRFNASLGTYHDLLKIIKDKDFLDNEENEDILEDIVLTLTLFEDREMIEERLKTYAHLFDDKVMKQLKRRRYTGWGRLSRKLINGIRDKQSGKTILDFLKSDGFANRNFMQLIHDDSLTFKEDIQKAQVSGQGDSLHEHIANLAGSPAIKKGILQTVKVVDELVKVMGRHKPENIVIEMARENQTTQKGQKNSRERMKRIEEGIKELGSQILKEHPVENTQLQNEKLYLYYLQNGRDMYVDQELDINRLSDYDVDHIVPQSFLKDDSIDNKVLTRSDKARGKSDNVPSEEVVKKMKNYWRQLLNAKLITQRKFDNLTKAERGGLSELDKAGFIKRQLVETRQITKHVAQILDSRMNTKYDENDKLIREVKVITLKSKLVSDFRKDFQFYKVREINNYHHAHDAYLNAVVGTALIKKYPKLESEFVYGDYKVYDVRKMIAKSEQEIGKATAKYFFYSNIMNFFKTEITLANGEIRKRPLIETNGETGEIVWDKGRDFATVRKVLSMPQVNIVKKTEVQTGGFSKESILPKRNSDKLIARKKDWDPKKYGGFDSPTVAYSVLVVAKVEKGKSKKLKSVKELLGITIMERSSFEKNPIDFLEAKGYKEVKKDLIIKLPKYSLFELENGRKRMLASAGELQKGNELALPSKYVNFLYLASHYEKLKGSPEDNEQKQLFVEQHKHYLDEIIEQISEFSKRVILADANLDKVLSAYNKHRDKPIREQAENIIHLFTLTNLGAPAAFKYFDTTIDRKRYTSTKEVLDATLIHQSITGLYETRIDLSQLGGDGGGGGGGSEAAAKGGWVQEISDSRPMLHIYLNGRRFLGLLNTGADKTCIAGRDWPANWPIHQTESSLQGLGMACGVARSSQPLRWQHEDKSGIIHPFVIPTLPFTLWGRDIMKDIKVRLMTDSPDDSQDLMIGAIESNLFADQISWKSDQPVWLNQWPLKQEKLQALQQLVTEQLQLGHLEESNSPWNTPVFVIKKKSGKWRLLQDLRAVNATMHDMGALQPGLPSPVAVPKGWEIIIIDLQDCFFNIKLHPEDCKRFAFSVPSPNFKRPYQRFQWKVLPQGMKNSPTLCQKFVDKAILTVRDKYQDSYIVHYMDDILLAHPSRSIVDEILTSMIQALNKHGLVVSTEKIQKYDNLKYLGTHIQGDSVSYQKLQIRTDKLRTLNDFQKLLGNINWIRPFLKLTTGELKPLFEILNGDSNPISTRKLTPEACKALQLMNERLSTARVKRLDLSQPWSLCILKTEYTPTACLWQDGVVEWIHLPHISPKVITPYDIFCTQLIIKGRHRSKELFSKDPDYIVVPYTKVQFDLLLQEKEDWPISLLGFLGEVHFHLPKDPLLTFTLQTAIIFPHMTSTTPLEKGIVIFTDGSANGRSVTYIQGREPIIKENTQNTAQQAEIVAVITAFEEVSQPFNLYTDSKYVTGLFPEIETATLSPRTKIYTELKHLQRLIHKRQEKFYIGHIRGHTGLPGPLAQGNAYADSLTRILTAGKRTADGSEFEKRTADGSEFESPKKKAKVE

SEQ ID NO: 3280 - protein, 2125 aa, synthetic construct; identical to SEQ ID NO: 3193
  source 1..2125: note = Description of Artificial Sequence: Synthetic polypeptide

SEQ ID NO: 3281 - protein, 2120 aa, synthetic construct
  source 1..2120: note = Description of Artificial Sequence: Synthetic polypeptide
MPAAKRVKLDGGDKKYSIGLDIGTNSVGWAVITDEYKVPSKKFKVLGNTDRHSIKKNLIGALLFDSGETAEATRLKRTARRRYTRRKNRICYLQEIFSNEMAKVDDSFFHRLEESFLVEEDKKHERHPIFGNIVDEVAYHEKYPTIYHLRKKLVDSTDKADLRLIYLALAHMIKFRGHFLIEGDLNPDNSDVDKLFIQLVQTYNQLFEENPINASGVDAKAILSARLSKSRRLENLIAQLPGEKKNGLFGNLIALSLGLTPNFKSNFDLAEDAKLQLSKDTYDDDLDNLLAQIGDQYADLFLAAKNLSDAILLSDILRVNTEITKAPLSASMIKRYDEHHQDLTLLKALVRQQLPEKYKEIFFDQSKNGYAGYIDGGASQEEFYKFIKPILEKMDGTEELLVKLNREDLLRKQRTFDNGSIPHQIHLGELHAILRRQEDFYPFLKDNREKIEKILTFRIPYYVGPLARGNSRFAWMTRKSEETITPWNFEEVVDKGASAQSFIERMTNFDKNLPNEKVLPKHSLLYEYFTVYNELTKVKYVTEGMRKPAFLSGEQKKAIVDLLFKTNRKVTVKQLKEDYFKKIECFDSVEISGVEDRFNASLGTYHDLLKIIKDKDFLDNEENEDILEDIVLTLTLFEDREMIEERLKTYAHLFDDKVMKQLKRRRYTGWGRLSRKLINGIRDKQSGKTILDFLKSDGFANRNFMQLIHDDSLTFKEDIQKAQVSGQGDSLHEHIANLAGSPAIKKGILQTVKVVDELVKVMGRHKPENIVIEMARENQTTQKGQKNSRERMKRIEEGIKELGSQILKEHPVENTQLQNEKLYLYYLQNGRDMYVDQELDINRLSDYDVDHIVPQSFLKDDSIDNKVLTRSDKARGKSDNVPSEEVVKKMKNYWRQLLNAKLITQRKFDNLTKAERGGLSELDKAGFIKRQLVETRQITKHVAQILDSRMNTKYDENDKLIREVKVITLKSKLVSDFRKDFQFYKVREINNYHHAHDAYLNAVVGTALIKKYPKLESEFVYGDYKVYDVRKMIAKSEQEIGKATAKYFFYSNIMNFFKTEITLANGEIRKRPLIETNGETGEIVWDKGRDFATVRKVLSMPQVNIVKKTEVQTGGFSKESILPKRNSDKLIARKKDWDPKKYGGFDSPTVAYSVLVVAKVEKGKSKKLKSVKELLGITIMERSSFEKNPIDFLEAKGYKEVKKDLIIKLPKYSLFELENGRKRMLASAGELQKGNELALPSKYVNFLYLASHYEKLKGSPEDNEQKQLFVEQHKHYLDEIIEQISEFSKRVILADANLDKVLSAYNKHRDKPIREQAENIIHLFTLTNLGAPAAFKYFDTTIDRKRYTSTKEVLDATLIHQSITGLYETRIDLSQLGGDGGGSSGSSGSSGSSGSSGGWVQEISDSRPMLHIYLNGRRFLGLLNTGADKTCIAGRDWPANWPIHQTESSLQGLGMACGVARSSQPLRWQHEDKSGIIHPFVIPTLPFTLWGRDIMKDIKVRLMTDSPDDSQDLMIGAIESNLFADQISWKSDQPVWLNQWPLKQEKLQALQQLVTEQLQLGHLEESNSPWNTPVFVIKKKSGKWRLLQDLRAVNATMHDMGALQPGLPSPVAVPKGWEIIIIDLQDCFFNIKLHPEDCKRFAFSVPSPNFKRPYQRFQWKVLPQGMKNSPTLCQKFVDKAILTVRDKYQDSYIVHYMDDILLAHPSRSIVDEILTSMIQALNKHGLVVSTEKIQKYDNLKYLGTHIQGDSVSYQKLQIRTDKLRTLNDFQKLLGNINWIRPFLKLTTGELKPLFEILNGDSNPISTRKLTPEACKALQLMNERLSTARVKRLDLSQPWSLCILKTEYTPTACLWQDGVVEWIHLPHISPKVITPYDIFCTQLIIKGRHRSKELFSKDPDYIVVPYTKVQFDLLLQEKEDWPISLLGFLGEVHFHLPKDPLLTFTLQTAIIFPHMTSTTPLEKGIVIFTDGSANGRSVTYIQGREPIIKENTQNTAQQAEIVAVITAFEEVSQPFNLYTDSKYVTGLFPEIETATLSPRTKIYTELKHLQRLIHKRQEKFYIGHIRGHTGLPGPLAQGNAYADSLTRILTAGKRTADGSEFEKRTADGSEFESPKKKAKVE

SEQ ID NO: 3282 - protein, 2123 aa, synthetic construct
  source 1..2123: note = Description of Artificial Sequence: Synthetic polypeptide
MPAAKRVKLDGGDKKYSIGLDIGTNSVGWAVITDEYKVPSKKFKVLGNTDRHSIKKNLIGALLFDSGETAEATRLKRTARRRYTRRKNRICYLQEIFSNEMAKVDDSFFHRLEESFLVEEDKKHERHPIFGNIVDEVAYHEKYPTIYHLRKKLVDSTDKADLRLIYLALAHMIKFRGHFLIEGDLNPDNSDVDKLFIQLVQTYNQLFEENPINASGVDAKAILSARLSKSRRLENLIAQLPGEKKNGLFGNLIALSLGLTPNFKSNFDLAEDAKLQLSKDTYDDDLDNLLAQIGDQYADLFLAAKNLSDAILLSDILRVNTEITKAPLSASMIKRYDEHHQDLTLLKALVRQQLPEKYKEIFFDQSKNGYAGYIDGGASQEEFYKFIKPILEKMDGTEELLVKLNREDLLRKQRTFDNGSIPHQIHLGELHAILRRQEDFYPFLKDNREKIEKILTFRIPYYVGPLARGNSRFAWMTRKSEETITPWNFEEVVDKGASAQSFIERMTNFDKNLPNEKVLPKHSLLYEYFTVYNELTKVKYVTEGMRKPAFLSGEQKKAIVDLLFKTNRKVTVKQLKEDYFKKIECFDSVEISGVEDRFNASLGTYHDLLKIIKDKDFLDNEENEDILEDIVLTLTLFEDREMIEERLKTYAHLFDDKVMKQLKRRRYTGWGRLSRKLINGIRDKQSGKTILDFLKSDGFANRNFMQLIHDDSLTFKEDIQKAQVSGQGDSLHEHIANLAGSPAIKKGILQTVKVVDELVKVMGRHKPENIVIEMARENQTTQKGQKNSRERMKRIEEGIKELGSQILKEHPVENTQLQNEKLYLYYLQNGRDMYVDQELDINRLSDYDVDHIVPQSFLKDDSIDNKVLTRSDKARGKSDNVPSEEVVKKMKNYWRQLLNAKLITQRKFDNLTKAERGGLSELDKAGFIKRQLVETRQITKHVAQILDSRMNTKYDENDKLIREVKVITLKSKLVSDFRKDFQFYKVREINNYHHAHDAYLNAVVGTALIKKYPKLESEFVYGDYKVYDVRKMIAKSEQEIGKATAKYFFYSNIMNFFKTEITLANGEIRKRPLIETNGETGEIVWDKGRDFATVRKVLSMPQVNIVKKTEVQTGGFSKESILPKRNSDKLIARKKDWDPKKYGGFDSPTVAYSVLVVAKVEKGKSKKLKSVKELLGITIMERSSFEKNPIDFLEAKGYKEVKKDLIIKLPKYSLFELENGRKRMLASAGELQKGNELALPSKYVNFLYLASHYEKLKGSPEDNEQKQLFVEQHKHYLDEIIEQISEFSKRVILADANLDKVLSAYNKHRDKPIREQAENIIHLFTLTNLGAPAAFKYFDTTIDRKRYTSTKEVLDATLIHQSITGLYETRIDLSQLGGDGGGSSGSSGSSGSSGSSGSSGGWVQEISDSRPMLHIYLNGRRFLGLLNTGADKTCIAGRDWPANWPIHQTESSLQGLGMACGVARSSQPLRWQHEDKSGIIHPFVIPTLPFTLWGRDIMKDIKVRLMTDSPDDSQDLMIGAIESNLFADQISWKSDQPVWLNQWPLKQEKLQALQQLVTEQLQLGHLEESNSPWNTPVFVIKKKSGKWRLLQDLRAVNATMHDMGALQPGLPSPVAVPKGWEIIIIDLQDCFFNIKLHPEDCKRFAFSVPSPNFKRPYQRFQWKVLPQGMKNSPTLCQKFVDKAILTVRDKYQDSYIVHYMDDILLAHPSRSIVDEILTSMIQALNKHGLVVSTEKIQKYDNLKYLGTHIQGDSVSYQKLQIRTDKLRTLNDFQKLLGNINWIRPFLKLTTGELKPLFEILNGDSNPISTRKLTPEACKALQLMNERLSTARVKRLDLSQPWSLCILKTEYTPTACLWQDGVVEWIHLPHISPKVITPYDIFCTQLIIKGRHRSKELFSKDPDYIVVPYTKVQFDLLLQEKEDWPISLLGFLGEVHFHLPKDPLLTFTLQTAIIFPHMTSTTPLEKGIVIFTDGSANGRSVTYIQGREPIIKENTQNTAQQAEIVAVITAFEEVSQPFNLYTDSKYVTGLFPEIETATLSPRTKIYTELKHLQRLIHKRQEKFYIGHIRGHTGLPGPLAQGNAYADSLTRILTAGKRTADGSEFEKRTADGSEFESPKKKAKVE

SEQ ID NO: 3283 - protein, 2116 aa, synthetic construct
  source 1..2116: note = Description of Artificial Sequence: Synthetic polypeptide
MPAAKRVKLDGGDKKYSIGLDIGTNSVGWAVITDEYKVPSKKFKVLGNTDRHSIKKNLIGALLFDSGETAEATRLKRTARRRYTRRKNRICYLQEIFSNEMAKVDDSFFHRLEESFLVEEDKKHERHPIFGNIVDEVAYHEKYPTIYHLRKKLVDSTDKADLRLIYLALAHMIKFRGHFLIEGDLNPDNSDVDKLFIQLVQTYNQLFEENPINASGVDAKAILSARLSKSRRLENLIAQLPGEKKNGLFGNLIALSLGLTPNFKSNFDLAEDAKLQLSKDTYDDDLDNLLAQIGDQYADLFLAAKNLSDAILLSDILRVNTEITKAPLSASMIKRYDEHHQDLTLLKALVRQQLPEKYKEIFFDQSKNGYAGYIDGGASQEEFYKFIKPILEKMDGTEELLVKLNREDLLRKQRTFDNGSIPHQIHLGELHAILRRQEDFYPFLKDNREKIEKILTFRIPYYVGPLARGNSRFAWMTRKSEETITPWNFEEVVDKGASAQSFIERMTNFDKNLPNEKVLPKHSLLYEYFTVYNELTKVKYVTEGMRKPAFLSGEQKKAIVDLLFKTNRKVTVKQLKEDYFKKIECFDSVEISGVEDRFNASLGTYHDLLKIIKDKDFLDNEENEDILEDIVLTLTLFEDREMIEERLKTYAHLFDDKVMKQLKRRRYTGWGRLSRKLINGIRDKQSGKTILDFLKSDGFANRNFMQLIHDDSLTFKEDIQKAQVSGQGDSLHEHIANLAGSPAIKKGILQTVKVVDELVKVMGRHKPENIVIEMARENQTTQKGQKNSRERMKRIEEGIKELGSQILKEHPVENTQLQNEKLYLYYLQNGRDMYVDQELDINRLSDYDVDHIVPQSFLKDDSIDNKVLTRSDKARGKSDNVPSEEVVKKMKNYWRQLLNAKLITQRKFDNLTKAERGGLSELDKAGFIKRQLVETRQITKHVAQILDSRMNTKYDENDKLIREVKVITLKSKLVSDFRKDFQFYKVREINNYHHAHDAYLNAVVGTALIKKYPKLESEFVYGDYKVYDVRKMIAKSEQEIGKATAKYFFYSNIMNFFKTEITLANGEIRKRPLIETNGETGEIVWDKGRDFATVRKVLSMPQVNIVKKTEVQTGGFSKESILPKRNSDKLIARKKDWDPKKYGGFDSPTVAYSVLVVAKVEKGKSKKLKSVKELLGITIMERSSFEKNPIDFLEAKGYKEVKKDLIIKLPKYSLFELENGRKRMLASAGELQKGNELALPSKYVNFLYLASHYEKLKGSPEDNEQKQLFVEQHKHYLDEIIEQISEFSKRVILADANLDKVLSAYNKHRDKPIREQAENIIHLFTLTNLGAPAAFKYFDTTIDRKRYTSTKEVLDATLIHQSITGLYETRIDLSQLGGDGGEAAAKGGGGSSGGWVQEISDSRPMLHIYLNGRRFLGLLNTGADKTCIAGRDWPANWPIHQTESSLQGLGMACGVARSSQPLRWQHEDKSGIIHPFVIPTLPFTLWGRDIMKDIKVRLMTDSPDDSQDLMIGAIESNLFADQISWKSDQPVWLNQWPLKQEKLQALQQLVTEQLQLGHLEESNSPWNTPVFVIKKKSGKWRLLQDLRAVNATMHDMGALQPGLPSPVAVPKGWEIIIIDLQDCFFNIKLHPEDCKRFAFSVPSPNFKRPYQRFQWKVLPQGMKNSPTLCQKFVDKAILTVRDKYQDSYIVHYMDDILLAHPSRSIVDEILTSMIQALNKHGLVVSTEKIQKYDNLKYLGTHIQGDSVSYQKLQIRTDKLRTLNDFQKLLGNINWIRPFLKLTTGELKPLFEILNGDSNPISTRKLTPEACKALQLMNERLSTARVKRLDLSQPWSLCILKTEYTPTACLWQDGVVEWIHLPHISPKVITPYDIFCTQLIIKGRHRSKELFSKDPDYIVVPYTKVQFDLLLQEKEDWPISLLGFLGEVHFHLPKDPLLTFTLQTAIIFPHMTSTTPLEKGIVIFTDGSANGRSVTYIQGREPIIKENTQNTAQQAEIVAVITAFEEVSQPFNLYTDSKYVTGLFPEIETATLSPRTKIYTELKHLQRLIHKRQEKFYIGHIRGHTGLPGPLAQGNAYADSLTRILTAGKRTADGSEFEKRTADGSEFESPKKKAKVE

SEQ ID NO: 3284 - protein, 2116 aa, synthetic construct
  source 1..2116: note = Description of Artificial Sequence: Synthetic polypeptide
MPAAKRVKLDGGDKKYSIGLDIGTNSVGWAVITDEYKVPSKKFKVLGNTDRHSIKKNLIGALLFDSGETAEATRLKRTARRRYTRRKNRICYLQEIFSNEMAKVDDSFFHRLEESFLVEEDKKHERHPIFGNIVDEVAYHEKYPTIYHLRKKLVDSTDKADLRLIYLALAHMIKFRGHFLIEGDLNPDNSDVDKLFIQLVQTYNQLFEENPINASGVDAKAILSARLSKSRRLENLIAQLPGEKKNGLFGNLIALSLGLTPNFKSNFDLAEDAKLQLSKDTYDDDLDNLLAQIGDQYADLFLAAKNLSDAILLSDILRVNTEITKAPLSASMIKRYDEHHQDLTLLKALVRQQLPEKYKEIFFDQSKNGYAGYIDGGASQEEFYKFIKPILEKMDGTEELLVKLNREDLLRKQRTFDNGSIPHQIHLGELHAILRRQEDFYPFLKDNREKIEKILTFRIPYYVGPLARGNSRFAWMTRKSEETITPWNFEEVVDKGASAQSFIERMTNFDKNLPNEKVLPKHSLLYEYFTVYNELTKVKYVTEGMRKPAFLSGEQKKAIVDLLFKTNRKVTVKQLKEDYFKKIECFDSVEISGVEDRFNASLGTYHDLLKIIKDKDFLDNEENEDILEDIVLTLTLFEDREMIEERLKTYAHLFDDKVMKQLKRRRYTGWGRLSRKLINGIRDKQSGKTILDFLKSDGFANRNFMQLIHDDSLTFKEDIQKAQVSGQGDSLHEHIANLAGSPAIKKGILQTVKVVDELVKVMGRHKPENIVIEMARENQTTQKGQKNSRERMKRIEEGIKELGSQILKEHPVENTQLQNEKLYLYYLQNGRDMYVDQELDINRLSDYDVDHIVPQSFLKDDSIDNKVLTRSDKARGKSDNVPSEEVVKKMKNYWRQLLNAKLITQRKFDNLTKAERGGLSELDKAGFIKRQLVETRQITKHVAQILDSRMNTKYDENDKLIREVKVITLKSKLVSDFRKDFQFYKVREINNYHHAHDAYLNAVVGTALIKKYPKLESEFVYGDYKVYDVRKMIAKSEQEIGKATAKYFFYSNIMNFFKTEITLANGEIRKRPLIETNGETGEIVWDKGRDFATVRKVLSMPQVNIVKKTEVQTGGFSKESILPKRNSDKLIARKKDWDPKKYGGFDSPTVAYSVLVVAKVEKGKSKKLKSVKELLGITIMERSSFEKNPIDFLEAKGYKEVKKDLIIKLPKYSLFELENGRKRMLASAGELQKGNELALPSKYVNFLYLASHYEKLKGSPEDNEQKQLFVEQHKHYLDEIIEQISEFSKRVILADANLDKVLSAYNKHRDKPIREQAENIIHLFTLTNLGAPAAFKYFDTTIDRKRYTSTKEVLDATLIHQSITGLYETRIDLSQLGGDGGEAAAKGGGGGSGGWVQEISDSRPMLHIYLNGRRFLGLLNTGADKTCIAGRDWPANWPIHQTESSLQGLGMACGVARSSQPLRWQHEDKSGIIHPFVIPTLPFTLWGRDIMKDIKVRLMTDSPDDSQDLMIGAIESNLFADQISWKSDQPVWLNQWPLKQEKLQALQQLVTEQLQLGHLEESNSPWNTPVFVIKKKSGKWRLLQDLRAVNATMHDMGALQPGLPSPVAVPKGWEIIIIDLQDCFFNIKLHPEDCKRFAFSVPSPNFKRPYQRFQWKVLPQGMKNSPTLCQKFVDKAILTVRDKYQDSYIVHYMDDILLAHPSRSIVDEILTSMIQALNKHGLVVSTEKIQKYDNLKYLGTHIQGDSVSYQKLQIRTDKLRTLNDFQKLLGNINWIRPFLKLTTGELKPLFEILNGDSNPISTRKLTPEACKALQLMNERLSTARVKRLDLSQPWSLCILKTEYTPTACLWQDGVVEWIHLPHISPKVITPYDIFCTQLIIKGRHRSKELFSKDPDYIVVPYTKVQFDLLLQEKEDWPISLLGFLGEVHFHLPKDPLLTFTLQTAIIFPHMTSTTPLEKGIVIFTDGSANGRSVTYIQGREPIIKENTQNTAQQAEIVAVITAFEEVSQPFNLYTDSKYVTGLFPEIETATLSPRTKIYTELKHLQRLIHKRQEKFYIGHIRGHTGLPGPLAQGNAYADSLTRILTAGKRTADGSEFEKRTADGSEFESPKKKAKVE

SEQ ID NO: 3285 - protein, 2116 aa, synthetic construct
  source 1..2116: note = Description of Artificial Sequence: Synthetic polypeptide
MPAAKRVKLDGGDKKYSIGLDIGTNSVGWAVITDEYKVPSKKFKVLGNTDRHSIKKNLIGALLFDSGETAEATRLKRTARRRYTRRKNRICYLQEIFSNEMAKVDDSFFHRLEESFLVEEDKKHERHPIFGNIVDEVAYHEKYPTIYHLRKKLVDSTDKADLRLIYLALAHMIKFRGHFLIEGDLNPDNSDVDKLFIQLVQTYNQLFEENPINASGVDAKAILSARLSKSRRLENLIAQLPGEKKNGLFGNLIALSLGLTPNFKSNFDLAEDAKLQLSKDTYDDDLDNLLAQIGDQYADLFLAAKNLSDAILLSDILRVNTEITKAPLSASMIKRYDEHHQDLTLLKALVRQQLPEKYKEIFFDQSKNGYAGYIDGGASQEEFYKFIKPILEKMDGTEELLVKLNREDLLRKQRTFDNGSIPHQIHLGELHAILRRQEDFYPFLKDNREKIEKILTFRIPYYVGPLARGNSRFAWMTRKSEETITPWNFEEVVDKGASAQSFIERMTNFDKNLPNEKVLPKHSLLYEYFTVYNELTKVKYVTEGMRKPAFLSGEQKKAIVDLLFKTNRKVTVKQLKEDYFKKIECFDSVEISGVEDRFNASLGTYHDLLKIIKDKDFLDNEENEDILEDIVLTLTLFEDREMIEERLKTYAHLFDDKVMKQLKRRRYTGWGRLSRKLINGIRDKQSGKTILDFLKSDGFANRNFMQLIHDDSLTFKEDIQKAQVSGQGDSLHEHIANLAGSPAIKKGILQTVKVVDELVKVMGRHKPENIVIEMARENQTTQKGQKNSRERMKRIEEGIKELGSQILKEHPVENTQLQNEKLYLYYLQNGRDMYVDQELDINRLSDYDVDHIVPQSFLKDDSIDNKVLTRSDKARGKSDNVPSEEVVKKMKNYWRQLLNAKLITQRKFDNLTKAERGGLSELDKAGFIKRQLVETRQITKHVAQILDSRMNTKYDENDKLIREVKVITLKSKLVSDFRKDFQFYKVREINNYHHAHDAYLNAVVGTALIKKYPKLESEFVYGDYKVYDVRKMIAKSEQEIGKATAKYFFYSNIMNFFKTEITLANGEIRKRPLIETNGETGEIVWDKGRDFATVRKVLSMPQVNIVKKTEVQTGGFSKESILPKRNSDKLIARKKDWDPKKYGGFDSPTVAYSVLVVAKVEKGKSKKLKSVKELLGITIMERSSFEKNPIDFLEAKGYKEVKKDLIIKLPKYSLFELENGRKRMLASAGELQKGNELALPSKYVNFLYLASHYEKLKGSPEDNEQKQLFVEQHKHYLDEIIEQISEFSKRVILADANLDKVLSAYNKHRDKPIREQAENIIHLFTLTNLGAPAAFKYFDTTIDRKRYTSTKEVLDATLIHQSITGLYETRIDLSQLGGDGGGGGGSSEAAAKGGWVQEISDSRPMLHIYLNGRRFLGLLNTGADKTCIAGRDWPANWPIHQTESSLQGLGMACGVARSSQPLRWQHEDKSGIIHPFVIPTLPFTLWGRDIMKDIKVRLMTDSPDDSQDLMIGAIESNLFADQISWKSDQPVWLNQWPLKQEKLQALQQLVTEQLQLGHLEESNSPWNTPVFVIKKKSGKWRLLQDLRAVNATMHDMGALQPGLPSPVAVPKGWEIIIIDLQDCFFNIKLHPEDCKRFAFSVPSPNFKRPYQRFQWKVLPQGMKNSPTLCQKFVDKAILTVRDKYQDSYIVHYMDDILLAHPSRSIVDEILTSMIQALNKHGLVVSTEKIQKYDNLKYLGTHIQGDSVSYQKLQIRTDKLRTLNDFQKLLGNINWIRPFLKLTTGELKPLFEILNGDSNPISTRKLTPEACKALQLMNERLSTARVKRLDLSQPWSLCILKTEYTPTACLWQDGVVEWIHLPHISPKVITPYDIFCTQLIIKGRHRSKELFSKDPDYIVVPYTKVQFDLLLQEKEDWPISLLGFLGEVHFHLPKDPLLTFTLQTAIIFPHMTSTTPLEKGIVIFTDGSANGRSVTYIQGREPIIKENTQNTAQQAEIVAVITAFEEVSQPFNLYTDSKYVTGLFPEIETATLSPRTKIYTELKHLQRLIHKRQEKFYIGHIRGHTGLPGPLAQGNAYADSLTRILTAGKRTADGSEFEKRTADGSEFESPKKKAKVE

SEQ ID NO: 3286 - protein, 2116 aa, synthetic construct
  source 1..2116: note = Description of Artificial Sequence: Synthetic polypeptide
MPAAKRVKLDGGDKKYSIGLDIGTNSVGWAVITDEYKVPSKKFKVLGNTDRHSIKKNLIGALLFDSGETAEATRLKRTARRRYTRRKNRICYLQEIFSNEMAKVDDSFFHRLEESFLVEEDKKHERHPIFGNIVDEVAYHEKYPTIYHLRKKLVDSTDKADLRLIYLALAHMIKFRGHFLIEGDLNPDNSDVDKLFIQLVQTYNQLFEENPINASGVDAKAILSARLSKSRRLENLIAQLPGEKKNGLFGNLIALSLGLTPNFKSNFDLAEDAKLQLSKDTYDDDLDNLLAQIGDQYADLFLAAKNLSDAILLSDILRVNTEITKAPLSASMIKRYDEHHQDLTLLKALVRQQLPEKYKEIFFDQSKNGYAGYIDGGASQEEFYKFIKPILEKMDGTEELLVKLNREDLLRKQRTFDNGSIPHQIHLGELHAILRRQEDFYPFLKDNREKIEKILTFRIPYYVGPLARGNSRFAWMTRKSEETITPWNFEEVVDKGASAQSFIERMTNFDKNLPNEKVLPKHSLLYEYFTVYNELTKVKYVTEGMRKPAFLSGEQKKAIVDLLFKTNRKVTVKQLKEDYFKKIECFDSVEISGVEDRFNASLGTYHDLLKIIKDKDFLDNEENEDILEDIVLTLTLFEDREMIEERLKTYAHLFDDKVMKQLKRRRYTGWGRLSRKLINGIRDKQSGKTILDFLKSDGFANRNFMQLIHDDSLTFKEDIQKAQVSGQGDSLHEHIANLAGSPAIKKGILQTVKVVDELVKVMGRHKPENIVIEMARENQTTQKGQKNSRERMKRIEEGIKELGSQILKEHPVENTQLQNEKLYLYYLQNGRDMYVDQELDINRLSDYDVDHIVPQSFLKDDSIDNKVLTRSDKARGKSDNVPSEEVVKKMKNYWRQLLNAKLITQRKFDNLTKAERGGLSELDKAGFIKRQLVETRQITKHVAQILDSRMNTKYDENDKLIREVKVITLKSKLVSDFRKDFQFYKVREINNYHHAHDAYLNAVVGTALIKKYPKLESEFVYGDYKVYDVRKMIAKSEQEIGKATAKYFFYSNIMNFFKTEITLANGEIRKRPLIETNGETGEIVWDKGRDFATVRKVLSMPQVNIVKKTEVQTGGFSKESILPKRNSDKLIARKKDWDPKKYGGFDSPTVAYSVLVVAKVEKGKSKKLKSVKELLGITIMERSSFEKNPIDFLEAKGYKEVKKDLIIKLPKYSLFELENGRKRMLASAGELQKGNELALPSKYVNFLYLASHYEKLKGSPEDNEQKQLFVEQHKHYLDEIIEQISEFSKRVILADANLDKVLSAYNKHRDKPIREQAENIIHLFTLTNLGAPAAFKYFDTTIDRKRYTSTKEVLDATLIHQSITGLYETRIDLSQLGGDGGGGSGGGEAAAKGGWVQEISDSRPMLHIYLNGRRFLGLLNTGADKTCIAGRDWPANWPIHQTESSLQGLGMACGVARSSQPLRWQHEDKSGIIHPFVIPTLPFTLWGRDIMKDIKVRLMTDSPDDSQDLMIGAIESNLFADQISWKSDQPVWLNQWPLKQEKLQALQQLVTEQLQLGHLEESNSPWNTPVFVIKKKSGKWRLLQDLRAVNATMHDMGALQPGLPSPVAVPKGWEIIIIDLQDCFFNIKLHPEDCKRFAFSVPSPNFKRPYQRFQWKVLPQGMKNSPTLCQKFVDKAILTVRDKYQDSYIVHYMDDILLAHPSRSIVDEILTSMIQALNKHGLVVSTEKIQKYDNLKYLGTHIQGDSVSYQKLQIRTDKLRTLNDFQKLLGNINWIRPFLKLTTGELKPLFEILNGDSNPISTRKLTPEACKALQLMNERLSTARVKRLDLSQPWSLCILKTEYTPTACLWQDGVVEWIHLPHISPKVITPYDIFCTQLIIKGRHRSKELFSKDPDYIVVPYTKVQFDLLLQEKEDWPISLLGFLGEVHFHLPKDPLLTFTLQTAIIFPHMTSTTPLEKGIVIFTDGSANGRSVTYIQGREPIIKENTQNTAQQAEIVAVITAFEEVSQPFNLYTDSKYVTGLFPEIETATLSPRTKIYTELKHLQRLIHKRQEKFYIGHIRGHTGLPGPLAQGNAYADSLTRILTAGKRTADGSEFEKRTADGSEFESPKKKAKVE

SEQ ID NO: 3287 - protein, 2114 aa, synthetic construct; identical to SEQ ID NO: 3179
  source 1..2114: note = Description of Artificial Sequence: Synthetic polypeptide

SEQ ID NO: 3288 - protein, 2116 aa, synthetic construct
  source 1..2116: note = Description of Artificial Sequence: Synthetic polypeptide
MPAAKRVKLDGGDKKYSIGLDIGTNSVGWAVITDEYKVPSKKFKVLGNTDRHSIKKNLIGALLFDSGETAEATRLKRTARRRYTRRKNRICYLQEIFSNEMAKVDDSFFHRLEESFLVEEDKKHERHPIFGNIVDEVAYHEKYPTIYHLRKKLVDSTDKADLRLIYLALAHMIKFRGHFLIEGDLNPDNSDVDKLFIQLVQTYNQLFEENPINASGVDAKAILSARLSKSRRLENLIAQLPGEKKNGLFGNLIALSLGLTPNFKSNFDLAEDAKLQLSKDTYDDDLDNLLAQIGDQYADLFLAAKNLSDAILLSDILRVNTEITKAPLSASMIKRYDEHHQDLTLLKALVRQQLPEKYKEIFFDQSKNGYAGYIDGGASQEEFYKFIKPILEKMDGTEELLVKLNREDLLRKQRTFDNGSIPHQIHLGELHAILRRQEDFYPFLKDNREKIEKILTFRIPYYVGPLARGNSRFAWMTRKSEETITPWNFEEVVDKGASAQSFIERMTNFDKNLPNEKVLPKHSLLYEYFTVYNELTKVKYVTEGMRKPAFLSGEQKKAIVDLLFKTNRKVTVKQLKEDYFKKIECFDSVEISGVEDRFNASLGTYHDLLKIIKDKDFLDNEENEDILEDIVLTLTLFEDREMIEERLKTYAHLFDDKVMKQLKRRRYTGWGRLSRKLINGIRDKQSGKTILDFLKSDGFANRNFMQLIHDDSLTFKEDIQKAQVSGQGDSLHEHIANLAGSPAIKKGILQTVKVVDELVKVMGRHKPENIVIEMARENQTTQKGQKNSRERMKRIEEGIKELGSQILKEHPVENTQLQNEKLYLYYLQNGRDMYVDQELDINRLSDYDVDHIVPQSFLKDDSIDNKVLTRSDKARGKSDNVPSEEVVKKMKNYWRQLLNAKLITQRKFDNLTKAERGGLSELDKAGFIKRQLVETRQITKHVAQILDSRMNTKYDENDKLIREVKVITLKSKLVSDFRKDFQFYKVREINNYHHAHDAYLNAVVGTALIKKYPKLESEFVYGDYKVYDVRKMIAKSEQEIGKATAKYFFYSNIMNFFKTEITLANGEIRKRPLIETNGETGEIVWDKGRDFATVRKVLSMPQVNIVKKTEVQTGGFSKESILPKRNSDKLIARKKDWDPKKYGGFDSPTVAYSVLVVAKVEKGKSKKLKSVKELLGITIMERSSFEKNPIDFLEAKGYKEVKKDLIIKLPKYSLFELENGRKRMLASAGELQKGNELALPSKYVNFLYLASHYEKLKGSPEDNEQKQLFVEQHKHYLDEIIEQISEFSKRVILADANLDKVLSAYNKHRDKPIREQAENIIHLFTLTNLGAPAAFKYFDTTIDRKRYTSTKEVLDATLIHQSITGLYETRIDLSQLGGDGGPAPEAAAKGGSGGWVQEISDSRPMLHIYLNGRRFLGLLNTGADKTCIAGRDWPANWPIHQTESSLQGLGMACGVARSSQPLRWQHEDKSGIIHPFVIPTLPFTLWGRDIMKDIKVRLMTDSPDDSQDLMIGAIESNLFADQISWKSDQPVWLNQWPLKQEKLQALQQLVTEQLQLGHLEESNSPWNTPVFVIKKKSGKWRLLQDLRAVNATMHDMGALQPGLPSPVAVPKGWEIIIIDLQDCFFNIKLHPEDCKRFAFSVPSPNFKRPYQRFQWKVLPQGMKNSPTLCQKFVDKAILTVRDKYQDSYIVHYMDDILLAHPSRSIVDEILTSMIQALNKHGLVVSTEKIQKYDNLKYLGTHIQGDSVSYQKLQIRTDKLRTLNDFQKLLGNINWIRPFLKLTTGELKPLFEILNGDSNPISTRKLTPEACKALQLMNERLSTARVKRLDLSQPWSLCILKTEYTPTACLWQDGVVEWIHLPHISPKVITPYDIFCTQLIIKGRHRSKELFSKDPDYIVVPYTKVQFDLLLQEKEDWPISLLGFLGEVHFHLPKDPLLTFTLQTAIIFPHMTSTTPLEKGIVIFTDGSANGRSVTYIQGREPIIKENTQNTAQQAEIVAVITAFEEVSQPFNLYTDSKYVTGLFPEIETATLSPRTKIYTELKHLQRLIHKRQEKFYIGHIRGHTGLPGPLAQGNAYADSLTRILTAGKRTADGSEFEKRTADGSEFESPKKKAKVE

SEQ ID NO: 3289 - protein, 2116 aa, synthetic construct; identical to SEQ ID NO: 3178
  source 1..2116: note = Description of Artificial Sequence: Synthetic polypeptide

SEQ ID NO: 3290 - protein, 2116 aa, synthetic construct
  source 1..2116: note = Description of Artificial Sequence: Synthetic polypeptide
MPAAKRVKLDGGDKKYSIGLDIGTNSVGWAVITDEYKVPSKKFKVLGNTDRHSIKKNLIGALLFDSGETAEATRLKRTARRRYTRRKNRICYLQEIFSNEMAKVDDSFFHRLEESFLVEEDKKHERHPIFGNIVDEVAYHEKYPTIYHLRKKLVDSTDKADLRLIYLALAHMIKFRGHFLIEGDLNPDNSDVDKLFIQLVQTYNQLFEENPINASGVDAKAILSARLSKSRRLENLIAQLPGEKKNGLFGNLIALSLGLTPNFKSNFDLAEDAKLQLSKDTYDDDLDNLLAQIGDQYADLFLAAKNLSDAILLSDILRVNTEITKAPLSASMIKRYDEHHQDLTLLKALVRQQLPEKYKEIFFDQSKNGYAGYIDGGASQEEFYKFIKPILEKMDGTEELLVKLNREDLLRKQRTFDNGSIPHQIHLGELHAILRRQEDFYPFLKDNREKIEKILTFRIPYYVGPLARGNSRFAWMTRKSEETITPWNFEEVVDKGASAQSFIERMTNFDKNLPNEKVLPKHSLLYEYFTVYNELTKVKYVTEGMRKPAFLSGEQKKAIVDLLFKTNRKVTVKQLKEDYFKKIECFDSVEISGVEDRFNASLGTYHDLLKIIKDKDFLDNEENEDILEDIVLTLTLFEDREMIEERLKTYAHLFDDKVMKQLKRRRYTGWGRLSRKLINGIRDKQSGKTILDFLKSDGFANRNFMQLIHDDSLTFKEDIQKAQVSGQGDSLHEHIANLAGSPAIKKGILQTVKVVDELVKVMGRHKPENIVIEMARENQTTQKGQKNSRERMKRIEEGIKELGSQILKEHPVENTQLQNEKLYLYYLQNGRDMYVDQELDINRLSDYDVDHIVPQSFLKDDSIDNKVLTRSDKARGKSDNVPSEEVVKKMKNYWRQLLNAKLITQRKFDNLTKAERGGLSELDKAGFIKRQLVETRQITKHVAQILDSRMNTKYDENDKLIREVKVITLKSKLVSDFRKDFQFYKVREINNYHHAHDAYLNAVVGTALIKKYPKLESEFVYGDYKVYDVRKMIAKSEQEIGKATAKYFFYSNIMNFFKTEITLANGEIRKRPLIETNGETGEIVWDKGRDFATVRKVLSMPQVNIVKKTEVQTGGFSKESILPKRNSDKLIARKKDWDPKKYGGFDSPTVAYSVLVVAKVEKGKSKKLKSVKELLGITIMERSSFEKNPIDFLEAKGYKEVKKDLIIKLPKYSLFELENGRKRMLASAGELQKGNELALPSKYVNFLYLASHYEKLKGSPEDNEQKQLFVEQHKHYLDEIIEQISEFSKRVILADANLDKVLSAYNKHRDKPIREQAENIIHLFTLTNLGAPAAFKYFDTTIDRKRYTSTKEVLDATLIHQSITGLYETRIDLSQLGGDGGPAPGGSEAAAKGGWVQEISDSRPMLHIYLNGRRFLGLLNTGADKTCIAGRDWPANWPIHQTESSLQGLGMACGVARSSQPLRWQHEDKSGIIHPFVIPTLPFTLWGRDIMKDIKVRLMTDSPDDSQDLMIGAIESNLFADQISWKSDQPVWLNQWPLKQEKLQALQQLVTEQLQLGHLEESNSPWNTPVFVIKKKSGKWRLLQDLRAVNATMHDMGALQPGLPSPVAVPKGWEIIIIDLQDCFFNIKLHPEDCKRFAFSVPSPNFKRPYQRFQWKVLPQGMKNSPTLCQKFVDKAILTVRDKYQDSYIVHYMDDILLAHPSRSIVDEILTSMIQALNKHGLVVSTEKIQKYDNLKYLGTHIQGDSVSYQKLQIRTDKLRTLNDFQKLLGNINWIRPFLKLTTGELKPLFEILNGDSNPISTRKLTPEACKALQLMNERLSTARVKRLDLSQPWSLCILKTEYTPTACLWQDGVVEWIHLPHISPKVITPYDIFCTQLIIKGRHRSKELFSKDPDYIVVPYTKVQFDLLLQEKEDWPISLLGFLGEVHFHLPKDPLLTFTLQTAIIFPHMTSTTPLEKGIVIFTDGSANGRSVTYIQGREPIIKENTQNTAQQAEIVAVITAFEEVSQPFNLYTDSKYVTGLFPEIETATLSPRTKIYTELKHLQRLIHKRQEKFYIGHIRGHTGLPGPLAQGNAYADSLTRILTAGKRTADGSEFEKRTADGSEFESPKKKAKVE

SEQ ID NO: 3291 - protein, 2116 aa, synthetic construct
  source 1..2116: note = Description of Artificial Sequence: Synthetic polypeptide
MPAAKRVKLDGGDKKYSIGLDIGTNSVGWAVITDEYKVPSKKFKVLGNTDRHSIKKNLIGALLFDSGETAEATRLKRTARRRYTRRKNRICYLQEIFSNEMAKVDDSFFHRLEESFLVEEDKKHERHPIFGNIVDEVAYHEKYPTIYHLRKKLVDSTDKADLRLIYLALAHMIKFRGHFLIEGDLNPDNSDVDKLFIQLVQTYNQLFEENPINASGVDAKAILSARLSKSRRLENLIAQLPGEKKNGLFGNLIALSLGLTPNFKSNFDLAEDAKLQLSKDTYDDDLDNLLAQIGDQYADLFLAAKNLSDAILLSDILRVNTEITKAPLSASMIKRYDEHHQDLTLLKALVRQQLPEKYKEIFFDQSKNGYAGYIDGGASQEEFYKFIKPILEKMDGTEELLVKLNREDLLRKQRTFDNGSIPHQIHLGELHAILRRQEDFYPFLKDNREKIEKILTFRIPYYVGPLARGNSRFAWMTRKSEETITPWNFEEVVDKGASAQSFIERMTNFDKNLPNEKVLPKHSLLYEYFTVYNELTKVKYVTEGMRKPAFLSGEQKKAIVDLLFKTNRKVTVKQLKEDYFKKIECFDSVEISGVEDRFNASLGTYHDLLKIIKDKDFLDNEENEDILEDIVLTLTLFEDREMIEERLKTYAHLFDDKVMKQLKRRRYTGWGRLSRKLINGIRDKQSGKTILDFLKSDGFANRNFMQLIHDDSLTFKEDIQKAQVSGQGDSLHEHIANLAGSPAIKKGILQTVKVVDELVKVMGRHKPENIVIEMARENQTTQKGQKNSRERMKRIEEGIKELGSQILKEHPVENTQLQNEKLYLYYLQNGRDMYVDQELDINRLSDYDVDHIVPQSFLKDDSIDNKVLTRSDKARGKSDNVPSEEVVKKMKNYWRQLLNAKLITQRKFDNLTKAERGGLSELDKAGFIKRQLVETRQITKHVAQILDSRMNTKYDENDKLIREVKVITLKSKLVSDFRKDFQFYKVREINNYHHAHDAYLNAVVGTALIKKYPKLESEFVYGDYKVYDVRKMIAKSEQEIGKATAKYFFYSNIMNFFKTEITLANGEIRKRPLIETNGETGEIVWDKGRDFATVRKVLSMPQVNIVKKTEVQTGGFSKESILPKRNSDKLIARKKDWDPKKYGGFDSPTVAYSVLVVAKVEKGKSKKLKSVKELLGITIMERSSFEKNPIDFLEAKGYKEVKKDLIIKLPKYSLFELENGRKRMLASAGELQKGNELALPSKYVNFLYLASHYEKLKGSPEDNEQKQLFVEQHKHYLDEIIEQISEFSKRVILADANLDKVLSAYNKHRDKPIREQAENIIHLFTLTNLGAPAAFKYFDTTIDRKRYTSTKEVLDATLIHQSITGLYETRIDLSQLGGDGGGGSEAAAKGGGGGWVQEISDSRPMLHIYLNGRRFLGLLNTGADKTCIAGRDWPANWPIHQTESSLQGLGMACGVARSSQPLRWQHEDKSGIIHPFVIPTLPFTLWGRDIMKDIKVRLMTDSPDDSQDLMIGAIESNLFADQISWKSDQPVWLNQWPLKQEKLQALQQLVTEQLQLGHLEESNSPWNTPVFVIKKKSGKWRLLQDLRAVNATMHDMGALQPGLPSPVAVPKGWEIIIIDLQDCFFNIKLHPEDCKRFAFSVPSPNFKRPYQRFQWKVLPQGMKNSPTLCQKFVDKAILTVRDKYQDSYIVHYMDDILLAHPSRSIVDEILTSMIQALNKHGLVVSTEKIQKYDNLKYLGTHIQGDSVSYQKLQIRTDKLRTLNDFQKLLGNINWIRPFLKLTTGELKPLFEILNGDSNPISTRKLTPEACKALQLMNERLSTARVKRLDLSQPWSLCILKTEYTPTACLWQDGVVEWIHLPHISPKVITPYDIFCTQLIIKGRHRSKELFSKDPDYIVVPYTKVQFDLLLQEKEDWPISLLGFLGEVHFHLPKDPLLTFTLQTAIIFPHMTSTTPLEKGIVIFTDGSANGRSVTYIQGREPIIKENTQNTAQQAEIVAVITAFEEVSQPFNLYTDSKYVTGLFPEIETATLSPRTKIYTELKHLQRLIHKRQEKFYIGHIRGHTGLPGPLAQGNAYADSLTRILTAGKRTADGSEFEKRTADGSEFESPKKKAKVE

SEQ ID NO: 3292 - protein, 2114 aa, synthetic construct
  source 1..2114: note = Description of Artificial Sequence: Synthetic polypeptide
MPAAKRVKLDGGDKKYSIGLDIGTNSVGWAVITDEYKVPSKKFKVLGNTDRHSIKKNLIGALLFDSGETAEATRLKRTARRRYTRRKNRICYLQEIFSNEMAKVDDSFFHRLEESFLVEEDKKHERHPIFGNIVDEVAYHEKYPTIYHLRKKLVDSTDKADLRLIYLALAHMIKFRGHFLIEGDLNPDNSDVDKLFIQLVQTYNQLFEENPINASGVDAKAILSARLSKSRRLENLIAQLPGEKKNGLFGNLIALSLGLTPNFKSNFDLAEDAKLQLSKDTYDDDLDNLLAQIGDQYADLFLAAKNLSDAILLSDILRVNTEITKAPLSASMIKRYDEHHQDLTLLKALVRQQLPEKYKEIFFDQSKNGYAGYIDGGASQEEFYKFIKPILEKMDGTEELLVKLNREDLLRKQRTFDNGSIPHQIHLGELHAILRRQEDFYPFLKDNREKIEKILTFRIPYYVGPLARGNSRFAWMTRKSEETITPWNFEEVVDKGASAQSFIERMTNFDKNLPNEKVLPKHSLLYEYFTVYNELTKVKYVTEGMRKPAFLSGEQKKAIVDLLFKTNRKVTVKQLKEDYFKKIECFDSVEISGVEDRFNASLGTYHDLLKIIKDKDFLDNEENEDILEDIVLTLTLFEDREMIEERLKTYAHLFDDKVMKQLKRRRYTGWGRLSRKLINGIRDKQSGKTILDFLKSDGFANRNFMQLIHDDSLTFKEDIQKAQVSGQGDSLHEHIANLAGSPAIKKGILQTVKVVDELVKVMGRHKPENIVIEMARENQTTQKGQKNSRERMKRIEEGIKELGSQILKEHPVENTQLQNEKLYLYYLQNGRDMYVDQELDINRLSDYDVDHIVPQSFLKDDSIDNKVLTRSDKARGKSDNVPSEEVVKKMKNYWRQLLNAKLITQRKFDNLTKAERGGLSELDKAGFIKRQLVETRQITKHVAQILDSRMNTKYDENDKLIREVKVITLKSKLVSDFRKDFQFYKVREINNYHHAHDAYLNAVVGTALIKKYPKLESEFVYGDYKVYDVRKMIAKSEQEIGKATAKYFFYSNIMNFFKTEITLANGEIRKRPLIETNGETGEIVWDKGRDFATVRKVLSMPQVNIVKKTEVQTGGFSKESILPKRNSDKLIARKKDWDPKKYGGFDSPTVAYSVLVVAKVEKGKSKKLKSVKELLGITIMERSSFEKNPIDFLEAKGYKEVKKDLIIKLPKYSLFELENGRKRMLASAGELQKGNELALPSKYVNFLYLASHYEKLKGSPEDNEQKQLFVEQHKHYLDEIIEQISEFSKRVILADANLDKVLSAYNKHRDKPIREQAENIIHLFTLTNLGAPAAFKYFDTTIDRKRYTSTKEVLDATLIHQSITGLYETRIDLSQLGGDGGGGSGGSGGSGGWVQEISDSRPMLHIYLNGRRFLGLLNTGADKTCIAGRDWPANWPIHQTESSLQGLGMACGVARSSQPLRWQHEDKSGIIHPFVIPTLPFTLWGRDIMKDIKVRLMTDSPDDSQDLMIGAIESNLFADQISWKSDQPVWLNQWPLKQEKLQALQQLVTEQLQLGHLEESNSPWNTPVFVIKKKSGKWRLLQDLRAVNATMHDMGALQPGLPSPVAVPKGWEIIIIDLQDCFFNIKLHPEDCKRFAFSVPSPNFKRPYQRFQWKVLPQGMKNSPTLCQKFVDKAILTVRDKYQDSYIVHYMDDILLAHPSRSIVDEILTSMIQALNKHGLVVSTEKIQKYDNLKYLGTHIQGDSVSYQKLQIRTDKLRTLNDFQKLLGNINWIRPFLKLTTGELKPLFEILNGDSNPISTRKLTPEACKALQLMNERLSTARVKRLDLSQPWSLCILKTEYTPTACLWQDGVVEWIHLPHISPKVITPYDIFCTQLIIKGRHRSKELFSKDPDYIVVPYTKVQFDLLLQEKEDWPISLLGFLGEVHFHLPKDPLLTFTLQTAIIFPHMTSTTPLEKGIVIFTDGSANGRSVTYIQGREPIIKENTQNTAQQAEIVAVITAFEEVSQPFNLYTDSKYVTGLFPEIETATLSPRTKIYTELKHLQRLIHKRQEKFYIGHIRGHTGLPGPLAQGNAYADSLTRILTAGKRTADGSEFEKRTADGSEFESPKKKAKVE

SEQ ID NO: 3293 - protein, 2113 aa, synthetic construct
  source 1..2113: note = Description of Artificial Sequence: Synthetic polypeptide
MPAAKRVKLDGGDKKYSIGLDIGTNSVGWAVITDEYKVPSKKFKVLGNTDRHSIKKNLIGALLFDSGETAEATRLKRTARRRYTRRKNRICYLQEIFSNEMAKVDDSFFHRLEESFLVEEDKKHERHPIFGNIVDEVAYHEKYPTIYHLRKKLVDSTDKADLRLIYLALAHMIKFRGHFLIEGDLNPDNSDVDKLFIQLVQTYNQLFEENPINASGVDAKAILSARLSKSRRLENLIAQLPGEKKNGLFGNLIALSLGLTPNFKSNFDLAEDAKLQLSKDTYDDDLDNLLAQIGDQYADLFLAAKNLSDAILLSDILRVNTEITKAPLSASMIKRYDEHHQDLTLLKALVRQQLPEKYKEIFFDQSKNGYAGYIDGGASQEEFYKFIKPILEKMDGTEELLVKLNREDLLRKQRTFDNGSIPHQIHLGELHAILRRQEDFYPFLKDNREKIEKILTFRIPYYVGPLARGNSRFAWMTRKSEETITPWNFEEVVDKGASAQSFIERMTNFDKNLPNEKVLPKHSLLYEYFTVYNELTKVKYVTEGMRKPAFLSGEQKKAIVDLLFKTNRKVTVKQLKEDYFKKIECFDSVEISGVEDRFNASLGTYHDLLKIIKDKDFLDNEENEDILEDIVLTLTLFEDREMIEERLKTYAHLFDDKVMKQLKRRRYTGWGRLSRKLINGIRDKQSGKTILDFLKSDGFANRNFMQLIHDDSLTFKEDIQKAQVSGQGDSLHEHIANLAGSPAIKKGILQTVKVVDELVKVMGRHKPENIVIEMARENQTTQKGQKNSRERMKRIEEGIKELGSQILKEHPVENTQLQNEKLYLYYLQNGRDMYVDQELDINRLSDYDVDHIVPQSFLKDDSIDNKVLTRSDKARGKSDNVPSEEVVKKMKNYWRQLLNAKLITQRKFDNLTKAERGGLSELDKAGFIKRQLVETRQITKHVAQILDSRMNTKYDENDKLIREVKVITLKSKLVSDFRKDFQFYKVREINNYHHAHDAYLNAVVGTALIKKYPKLESEFVYGDYKVYDVRKMIAKSEQEIGKATAKYFFYSNIMNFFKTEITLANGEIRKRPLIETNGETGEIVWDKGRDFATVRKVLSMPQVNIVKKTEVQTGGFSKESILPKRNSDKLIARKKDWDPKKYGGFDSPTVAYSVLVVAKVEKGKSKKLKSVKELLGITIMERSSFEKNPIDFLEAKGYKEVKKDLIIKLPKYSLFELENGRKRMLASAGELQKGNELALPSKYVNFLYLASHYEKLKGSPEDNEQKQLFVEQHKHYLDEIIEQISEFSKRVILADANLDKVLSAYNKHRDKPIREQAENIIHLFTLTNLGAPAAFKYFDTTIDRKRYTSTKEVLDATLIHQSITGLYETRIDLSQLGGDGGGGSEAAAKGGWVQEISDSRPMLHIYLNGRRFLGLLNTGADKTCIAGRDWPANWPIHQTESSLQGLGMACGVARSSQPLRWQHEDKSGIIHPFVIPTLPFTLWGRDIMKDIKVRLMTDSPDDSQDLMIGAIESNLFADQISWKSDQPVWLNQWPLKQEKLQALQQLVTEQLQLGHLEESNSPWNTPVFVIKKKSGKWRLLQDLRAVNATMHDMGALQPGLPSPVAVPKGWEIIIIDLQDCFFNIKLHPEDCKRFAFSVPSPNFKRPYQRFQWKVLPQGMKNSPTLCQKFVDKAILTVRDKYQDSYIVHYMDDILLAHPSRSIVDEILTSMIQALNKHGLVVSTEKIQKYDNLKYLGTHIQGDSVSYQKLQIRTDKLRTLNDFQKLLGNINWIRPFLKLTTGELKPLFEILNGDSNPISTRKLTPEACKALQLMNERLSTARVKRLDLSQPWSLCILKTEYTPTACLWQDGVVEWIHLPHISPKVITPYDIFCTQLIIKGRHRSKELFSKDPDYIVVPYTKVQFDLLLQEKEDWPISLLGFLGEVHFHLPKDPLLTFTLQTAIIFPHMTSTTPLEKGIVIFTDGSANGRSVTYIQGREPIIKENTQNTAQQAEIVAVITAFEEVSQPFNLYTDSKYVTGLFPEIETATLSPRTKIYTELKHLQRLIHKRQEKFYIGHIRGHTGLPGPLAQGNAYADSLTRILTAGKRTADGSEFEKRTADGSEFESPKKKAKVE

SEQ ID NO: 3294 - protein, 2043 aa, synthetic construct
  source 1..2043: note = Description of Artificial Sequence: Synthetic polypeptide
MPAAKRVKLDGGDKKYSIGLDIGTNSVGWAVITDEYKVPSKKFKVLGNTDRHSIKKNLIGALLFDSGETAEATRLKRTARRRYTRRKNRICYLQEIFSNEMAKVDDSFFHRLEESFLVEEDKKHERHPIFGNIVDEVAYHEKYPTIYHLRKKLVDSTDKADLRLIYLALAHMIKFRGHFLIEGDLNPDNSDVDKLFIQLVQTYNQLFEENPINASGVDAKAILSARLSKSRRLENLIAQLPGEKKNGLFGNLIALSLGLTPNFKSNFDLAEDAKLQLSKDTYDDDLDNLLAQIGDQYADLFLAAKNLSDAILLSDILRVNTEITKAPLSASMIKRYDEHHQDLTLLKALVRQQLPEKYKEIFFDQSKNGYAGYIDGGASQEEFYKFIKPILEKMDGTEELLVKLNREDLLRKQRTFDNGSIPHQIHLGELHAILRRQEDFYPFLKDNREKIEKILTFRIPYYVGPLARGNSRFAWMTRKSEETITPWNFEEVVDKGASAQSFIERMTNFDKNLPNEKVLPKHSLLYEYFTVYNELTKVKYVTEGMRKPAFLSGEQKKAIVDLLFKTNRKVTVKQLKEDYFKKIECFDSVEISGVEDRFNASLGTYHDLLKIIKDKDFLDNEENEDILEDIVLTLTLFEDREMIEERLKTYAHLFDDKVMKQLKRRRYTGWGRLSRKLINGIRDKQSGKTILDFLKSDGFANRNFMQLIHDDSLTFKEDIQKAQVSGQGDSLHEHIANLAGSPAIKKGILQTVKVVDELVKVMGRHKPENIVIEMARENQTTQKGQKNSRERMKRIEEGIKELGSQILKEHPVENTQLQNEKLYLYYLQNGRDMYVDQELDINRLSDYDVDHIVPQSFLKDDSIDNKVLTRSDKARGKSDNVPSEEVVKKMKNYWRQLLNAKLITQRKFDNLTKAERGGLSELDKAGFIKRQLVETRQITKHVAQILDSRMNTKYDENDKLIREVKVITLKSKLVSDFRKDFQFYKVREINNYHHAHDAYLNAVVGTALIKKYPKLESEFVYGDYKVYDVRKMIAKSEQEIGKATAKYFFYSNIMNFFKTEITLANGEIRKRPLIETNGETGEIVWDKGRDFATVRKVLSMPQVNIVKKTEVQTGGFSKESILPKRNSDKLIARKKDWDPKKYGGFDSPTVAYSVLVVAKVEKGKSKKLKSVKELLGITIMERSSFEKNPIDFLEAKGYKEVKKDLIIKLPKYSLFELENGRKRMLASAGELQKGNELALPSKYVNFLYLASHYEKLKGSPEDNEQKQLFVEQHKHYLDEIIEQISEFSKRVILADANLDKVLSAYNKHRDKPIREQAENIIHLFTLTNLGAPAAFKYFDTTIDRKRYTSTKEVLDATLIHQSITGLYETRIDLSQLGGDGGEAAAKEAAAKEAAAKEAAAKEAAAKEAAAKGGGRDIMKDIKVRLMTDSPDDSQDLMIGAIESNLFADQISWKSDQPVWLNQWPLKQEKLQALQQLVTEQLQLGHLEESNSPWNTPVFVIKKKSGKWRLLQDLRAVNATMHDMGALQPGLPSPVAVPKGWEIIIIDLQDCFFNIKLHPEDCKRFAFSVPSPNFKRPYQRFQWKVLPQGMKNSPTLCQKFVDKAILTVRDKYQDSYIVHYMDDILLAHPSRSIVDEILTSMIQALNKHGLVVSTEKIQKYDNLKYLGTHIQGDSVSYQKLQIRTDKLRTLNDFQKLLGNINWIRPFLKLTTGELKPLFEILNGDSNPISTRKLTPEACKALQLMNERLSTARVKRLDLSQPWSLCILKTEYTPTACLWQDGVVEWIHLPHISPKVITPYDIFCTQLIIKGRHRSKELFSKDPDYIVVPYTKVQFDLLLQEKEDWPISLLGFLGEVHFHLPKDPLLTFTLQTAIIFPHMTSTTPLEKGIVIFTDGSANGRSVTYIQGREPIIKENTQNTAQQAEIVAVITAFEEVSQPFNLYTDSKYVTGLFPEIETATLSPRTKIYTELKHLQRLIHKRQEKFYIGHIRGHTGLPGPLAQGNAYADSLTRILTAGKRTADGSEFEKRTADGSEFESPKKKAKVE

SEQ ID NO: 3295 - protein, 2046 aa, synthetic construct; identical to SEQ ID NO: 3238
  source 1..2046: note = Description of Artificial Sequence: Synthetic polypeptide

SEQ ID NO: 3296 - protein, 2028 aa, synthetic construct; identical to SEQ ID NO: 3201
  source 1..2028: note = Description of Artificial Sequence: Synthetic polypeptide

SEQ ID NO: 3297 - protein, 2031 aa, synthetic construct
  source 1..2031: note = Description of Artificial Sequence: Synthetic polypeptide
MPAAKRVKLDGGDKKYSIGLDIGTNSVGWAVITDEYKVPSKKFKVLGNTDRHSIKKNLIGALLFDSGETAEATRLKRTARRRYTRRKNRICYLQEIFSNEMAKVDDSFFHRLEESFLVEEDKKHERHPIFGNIVDEVAYHEKYPTIYHLRKKLVDSTDKADLRLIYLALAHMIKFRGHFLIEGDLNPDNSDVDKLFIQLVQTYNQLFEENPINASGVDAKAILSARLSKSRRLENLIAQLPGEKKNGLFGNLIALSLGLTPNFKSNFDLAEDAKLQLSKDTYDDDLDNLLAQIGDQYADLFLAAKNLSDAILLSDILRVNTEITKAPLSASMIKRYDEHHQDLTLLKALVRQQLPEKYKEIFFDQSKNGYAGYIDGGASQEEFYKFIKPILEKMDGTEELLVKLNREDLLRKQRTFDNGSIPHQIHLGELHAILRRQEDFYPFLKDNREKIEKILTFRIPYYVGPLARGNSRFAWMTRKSEETITPWNFEEVVDKGASAQSFIERMTNFDKNLPNEKVLPKHSLLYEYFTVYNELTKVKYVTEGMRKPAFLSGEQKKAIVDLLFKTNRKVTVKQLKEDYFKKIECFDSVEISGVEDRFNASLGTYHDLLKIIKDKDFLDNEENEDILEDIVLTLTLFEDREMIEERLKTYAHLFDDKVMKQLKRRRYTGWGRLSRKLINGIRDKQSGKTILDFLKSDGFANRNFMQLIHDDSLTFKEDIQKAQVSGQGDSLHEHIANLAGSPAIKKGILQTVKVVDELVKVMGRHKPENIVIEMARENQTTQKGQKNSRERMKRIEEGIKELGSQILKEHPVENTQLQNEKLYLYYLQNGRDMYVDQELDINRLSDYDVDHIVPQSFLKDDSIDNKVLTRSDKARGKSDNVPSEEVVKKMKNYWRQLLNAKLITQRKFDNLTKAERGGLSELDKAGFIKRQLVETRQITKHVAQILDSRMNTKYDENDKLIREVKVITLKSKLVSDFRKDFQFYKVREINNYHHAHDAYLNAVVGTALIKKYPKLESEFVYGDYKVYDVRKMIAKSEQEIGKATAKYFFYSNIMNFFKTEITLANGEIRKRPLIETNGETGEIVWDKGRDFATVRKVLSMPQVNIVKKTEVQTGGFSKESILPKRNSDKLIARKKDWDPKKYGGFDSPTVAYSVLVVAKVEKGKSKKLKSVKELLGITIMERSSFEKNPIDFLEAKGYKEVKKDLIIKLPKYSLFELENGRKRMLASAGELQKGNELALPSKYVNFLYLASHYEKLKGSPEDNEQKQLFVEQHKHYLDEIIEQISEFSKRVILADANLDKVLSAYNKHRDKPIREQAENIIHLFTLTNLGAPAAFKYFDTTIDRKRYTSTKEVLDATLIHQSITGLYETRIDLSQLGGDGGGSSGSSGSSGSSGSSGSSGGGRDIMKDIKVRLMTDSPDDSQDLMIGAIESNLFADQISWKSDQPVWLNQWPLKQEKLQALQQLVTEQLQLGHLEESNSPWNTPVFVIKKKSGKWRLLQDLRAVNATMHDMGALQPGLPSPVAVPKGWEIIIIDLQDCFFNIKLHPEDCKRFAFSVPSPNFKRPYQRFQWKVLPQGMKNSPTLCQKFVDKAILTVRDKYQDSYIVHYMDDILLAHPSRSIVDEILTSMIQALNKHGLVVSTEKIQKYDNLKYLGTHIQGDSVSYQKLQIRTDKLRTLNDFQKLLGNINWIRPFLKLTTGELKPLFEILNGDSNPISTRKLTPEACKALQLMNERLSTARVKRLDLSQPWSLCILKTEYTPTACLWQDGVVEWIHLPHISPKVITPYDIFCTQLIIKGRHRSKELFSKDPDYIVVPYTKVQFDLLLQEKEDWPISLLGFLGEVHFHLPKDPLLTFTLQTAIIFPHMTSTTPLEKGIVIFTDGSANGRSVTYIQGREPIIKENTQNTAQQAEIVAVITAFEEVSQPFNLYTDSKYVTGLFPEIETATLSPRTKIYTELKHLQRLIHKRQEKFYIGHIRGHTGLPGPLAQGNAYADSLTRILTAGKRTADGSEFEKRTADGSEFESPKKKAKVE

SEQ ID NO: 3298 - protein, 2028 aa, synthetic construct
  source 1..2028: note = Description of Artificial Sequence: Synthetic polypeptide
MPAAKRVKLDGGDKKYSIGLDIGTNSVGWAVITDEYKVPSKKFKVLGNTDRHSIKKNLIGALLFDSGETAEATRLKRTARRRYTRRKNRICYLQEIFSNEMAKVDDSFFHRLEESFLVEEDKKHERHPIFGNIVDEVAYHEKYPTIYHLRKKLVDSTDKADLRLIYLALAHMIKFRGHFLIEGDLNPDNSDVDKLFIQLVQTYNQLFEENPINASGVDAKAILSARLSKSRRLENLIAQLPGEKKNGLFGNLIALSLGLTPNFKSNFDLAEDAKLQLSKDTYDDDLDNLLAQIGDQYADLFLAAKNLSDAILLSDILRVNTEITKAPLSASMIKRYDEHHQDLTLLKALVRQQLPEKYKEIFFDQSKNGYAGYIDGGASQEEFYKFIKPILEKMDGTEELLVKLNREDLLRKQRTFDNGSIPHQIHLGELHAILRRQEDFYPFLKDNREKIEKILTFRIPYYVGPLARGNSRFAWMTRKSEETITPWNFEEVVDKGASAQSFIERMTNFDKNLPNEKVLPKHSLLYEYFTVYNELTKVKYVTEGMRKPAFLSGEQKKAIVDLLFKTNRKVTVKQLKEDYFKKIECFDSVEISGVEDRFNASLGTYHDLLKIIKDKDFLDNEENEDILEDIVLTLTLFEDREMIEERLKTYAHLFDDKVMKQLKRRRYTGWGRLSRKLINGIRDKQSGKTILDFLKSDGFANRNFMQLIHDDSLTFKEDIQKAQVSGQGDSLHEHIANLAGSPAIKKGILQTVKVVDELVKVMGRHKPENIVIEMARENQTTQKGQKNSRERMKRIEEGIKELGSQILKEHPVENTQLQNEKLYLYYLQNGRDMYVDQELDINRLSDYDVDHIVPQSFLKDDSIDNKVLTRSDKARGKSDNVPSEEVVKKMKNYWRQLLNAKLITQRKFDNLTKAERGGLSELDKAGFIKRQLVETRQITKHVAQILDSRMNTKYDENDKLIREVKVITLKSKLVSDFRKDFQFYKVREINNYHHAHDAYLNAVVGTALIKKYPKLESEFVYGDYKVYDVRKMIAKSEQEIGKATAKYFFYSNIMNFFKTEITLANGEIRKRPLIETNGETGEIVWDKGRDFATVRKVLSMPQVNIVKKTEVQTGGFSKESILPKRNSDKLIARKKDWDPKKYGGFDSPTVAYSVLVVAKVEKGKSKKLKSVKELLGITIMERSSFEKNPIDFLEAKGYKEVKKDLIIKLPKYSLFELENGRKRMLASAGELQKGNELALPSKYVNFLYLASHYEKLKGSPEDNEQKQLFVEQHKHYLDEIIEQISEFSKRVILADANLDKVLSAYNKHRDKPIREQAENIIHLFTLTNLGAPAAFKYFDTTIDRKRYTSTKEVLDATLIHQSITGLYETRIDLSQLGGDGGGGGGSEAAAKGGGGSGGGRDIMKDIKVRLMTDSPDDSQDLMIGAIESNLFADQISWKSDQPVWLNQWPLKQEKLQALQQLVTEQLQLGHLEESNSPWNTPVFVIKKKSGKWRLLQDLRAVNATMHDMGALQPGLPSPVAVPKGWEIIIIDLQDCFFNIKLHPEDCKRFAFSVPSPNFKRPYQRFQWKVLPQGMKNSPTLCQKFVDKAILTVRDKYQDSYIVHYMDDILLAHPSRSIVDEILTSMIQALNKHGLVVSTEKIQKYDNLKYLGTHIQGDSVSYQKLQIRTDKLRTLNDFQKLLGNINWIRPFLKLTTGELKPLFEILNGDSNPISTRKLTPEACKALQLMNERLSTARVKRLDLSQPWSLCILKTEYTPTACLWQDGVVEWIHLPHISPKVITPYDIFCTQLIIKGRHRSKELFSKDPDYIVVPYTKVQFDLLLQEKEDWPISLLGFLGEVHFHLPKDPLLTFTLQTAIIFPHMTSTTPLEKGIVIFTDGSANGRSVTYIQGREPIIKENTQNTAQQAEIVAVITAFEEVSQPFNLYTDSKYVTGLFPEIETATLSPRTKIYTELKHLQRLIHKRQEKFYIGHIRGHTGLPGPLAQGNAYADSLTRILTAGKRTADGSEFEKRTADGSEFESPKKKAKVE

SEQ ID NO: 3299 - protein, 2028 aa, synthetic construct
  source 1..2028: note = Description of Artificial Sequence: Synthetic polypeptide
MPAAKRVKLDGGDKKYSIGLDIGTNSVGWAVITDEYKVPSKKFKVLGNTDRHSIKKNLIGALLFDSGETAEATRLKRTARRRYTRRKNRICYLQEIFSNEMAKVDDSFFHRLEESFLVEEDKKHERHPIFGNIVDEVAYHEKYPTIYHLRKKLVDSTDKADLRLIYLALAHMIKFRGHFLIEGDLNPDNSDVDKLFIQLVQTYNQLFEENPINASGVDAKAILSARLSKSRRLENLIAQLPGEKKNGLFGNLIALSLGLTPNFKSNFDLAEDAKLQLSKDTYDDDLDNLLAQIGDQYADLFLAAKNLSDAILLSDILRVNTEITKAPLSASMIKRYDEHHQDLTLLKALVRQQLPEKYKEIFFDQSKNGYAGYIDGGASQEEFYKFIKPILEKMDGTEELLVKLNREDLLRKQRTFDNGSIPHQIHLGELHAILRRQEDFYPFLKDNREKIEKILTFRIPYYVGPLARGNSRFAWMTRKSEETITPWNFEEVVDKGASAQSFIERMTNFDKNLPNEKVLPKHSLLYEYFTVYNELTKVKYVTEGMRKPAFLSGEQKKAIVDLLFKTNRKVTVKQLKEDYFKKIECFDSVEISGVEDRFNASLGTYHDLLKIIKDKDFLDNEENEDILEDIVLTLTLFEDREMIEERLKTYAHLFDDKVMKQLKRRRYTGWGRLSRKLINGIRDKQSGKTILDFLKSDGFANRNFMQLIHDDSLTFKEDIQKAQVSGQGDSLHEHIANLAGSPAIKKGILQTVKVVDELVKVMGRHKPENIVIEMARENQTTQKGQKNSRERMKRIEEGIKELGSQILKEHPVENTQLQNEKLYLYYLQNGRDMYVDQELDINRLSDYDVDHIVPQSFLKDDSIDNKVLTRSDKARGKSDNVPSEEVVKKMKNYWRQLLNAKLITQRKFDNLTKAERGGLSELDKAGFIKRQLVETRQITKHVAQILDSRMNTKYDENDKLIREVKVITLKSKLVSDFRKDFQFYKVREINNYHHAHDAYLNAVVGTALIKKYPKLESEFVYGDYKVYDVRKMIAKSEQEIGKATAKYFFYSNIMNFFKTEITLANGEIRKRPLIETNGETGEIVWDKGRDFATVRKVLSMPQVNIVKKTEVQTGGFSKESILPKRNSDKLIARKKDWDPKKYGGFDSPTVAYSVLVVAKVEKGKSKKLKSVKELLGITIMERSSFEKNPIDFLEAKGYKEVKKDLIIKLPKYSLFELENGRKRMLASAGELQKGNELALPSKYVNFLYLASHYEKLKGSPEDNEQKQLFVEQHKHYLDEIIEQISEFSKRVILADANLDKVLSAYNKHRDKPIREQAENIIHLFTLTNLGAPAAFKYFDTTIDRKRYTSTKEVLDATLIHQSITGLYETRIDLSQLGGDGGEAAAKEAAAKEAAAKGGGRDIMKDIKVRLMTDSPDDSQDLMIGAIESNLFADQISWKSDQPVWLNQWPLKQEKLQALQQLVTEQLQLGHLEESNSPWNTPVFVIKKKSGKWRLLQDLRAVNATMHDMGALQPGLPSPVAVPKGWEIIIIDLQDCFFNIKLHPEDCKRFAFSVPSPNFKRPYQRFQWKVLPQGMKNSPTLCQKFVDKAILTVRDKYQDSYIVHYMDDILLAHPSRSIVDEILTSMIQALNKHGLVVSTEKIQKYDNLKYLGTHIQGDSVSYQKLQIRTDKLRTLNDFQKLLGNINWIRPFLKLTTGELKPLFEILNGDSNPISTRKLTPEACKALQLMNERLSTARVKRLDLSQPWSLCILKTEYTPTACLWQDGVVEWIHLPHISPKVITPYDIFCTQLIIKGRHRSKELFSKDPDYIVVPYTKVQFDLLLQEKEDWPISLLGFLGEVHFHLPKDPLLTFTLQTAIIFPHMTSTTPLEKGIVIFTDGSANGRSVTYIQGREPIIKENTQNTAQQAEIVAVITAFEEVSQPFNLYTDSKYVTGLFPEIETATLSPRTKIYTELKHLQRLIHKRQEKFYIGHIRGHTGLPGPLAQGNAYADSLTRILTAGKRTADGSEFEKRTADGSEFESPKKKAKVE

SEQ ID NO: 3300 - protein, 2024 aa, synthetic construct; identical to SEQ ID NO: 3213
  source 1..2024: note = Description of Artificial Sequence: Synthetic polypeptide

SEQ ID NO: 3301 - protein, 2024 aa, synthetic construct
  source 1..2024: note = Description of Artificial Sequence: Synthetic polypeptide
MPAAKRVKLDGGDKKYSIGLDIGTNSVGWAVITDEYKVPSKKFKVLGNTDRHSIKKNLIGALLFDSGETAEATRLKRTARRRYTRRKNRICYLQEIFSNEMAKVDDSFFHRLEESFLVEEDKKHERHPIFGNIVDEVAYHEKYPTIYHLRKKLVDSTDKADLRLIYLALAHMIKFRGHFLIEGDLNPDNSDVDKLFIQLVQTYNQLFEENPINASGVDAKAILSARLSKSRRLENLIAQLPGEKKNGLFGNLIALSLGLTPNFKSNFDLAEDAKLQLSKDTYDDDLDNLLAQIGDQYADLFLAAKNLSDAILLSDILRVNTEITKAPLSASMIKRYDEHHQDLTLLKALVRQQLPEKYKEIFFDQSKNGYAGYIDGGASQEEFYKFIKPILEKMDGTEELLVKLNREDLLRKQRTFDNGSIPHQIHLGELHAILRRQEDFYPFLKDNREKIEKILTFRIPYYVGPLARGNSRFAWMTRKSEETITPWNFEEVVDKGASAQSFIERMTNFDKNLPNEKVLPKHSLLYEYFTVYNELTKVKYVTEGMRKPAFLSGEQKKAIVDLLFKTNRKVTVKQLKEDYFKKIECFDSVEISGVEDRFNASLGTYHDLLKIIKDKDFLDNEENEDILEDIVLTLTLFEDREMIEERLKTYAHLFDDKVMKQLKRRRYTGWGRLSRKLINGIRDKQSGKTILDFLKSDGFANRNFMQLIHDDSLTFKEDIQKAQVSGQGDSLHEHIANLAGSPAIKKGILQTVKVVDELVKVMGRHKPENIVIEMARENQTTQKGQKNSRERMKRIEEGIKELGSQILKEHPVENTQLQNEKLYLYYLQNGRDMYVDQELDINRLSDYDVDHIVPQSFLKDDSIDNKVLTRSDKARGKSDNVPSEEVVKKMKNYWRQLLNAKLITQRKFDNLTKAERGGLSELDKAGFIKRQLVETRQITKHVAQILDSRMNTKYDENDKLIREVKVITLKSKLVSDFRKDFQFYKVREINNYHHAHDAYLNAVVGTALIKKYPKLESEFVYGDYKVYDVRKMIAKSEQEIGKATAKYFFYSNIMNFFKTEITLANGEIRKRPLIETNGETGEIVWDKGRDFATVRKVLSMPQVNIVKKTEVQTGGFSKESILPKRNSDKLIARKKDWDPKKYGGFDSPTVAYSVLVVAKVEKGKSKKLKSVKELLGITIMERSSFEKNPIDFLEAKGYKEVKKDLIIKLPKYSLFELENGRKRMLASAGELQKGNELALPSKYVNFLYLASHYEKLKGSPEDNEQKQLFVEQHKHYLDEIIEQISEFSKRVILADANLDKVLSAYNKHRDKPIREQAENIIHLFTLTNLGAPAAFKYFDTTIDRKRYTSTKEVLDATLIHQSITGLYETRIDLSQLGGDGGEAAAKGSSGGSGGGRDIMKDIKVRLMTDSPDDSQDLMIGAIESNLFADQISWKSDQPVWLNQWPLKQEKLQALQQLVTEQLQLGHLEESNSPWNTPVFVIKKKSGKWRLLQDLRAVNATMHDMGALQPGLPSPVAVPKGWEIIIIDLQDCFFNIKLHPEDCKRFAFSVPSPNFKRPYQRFQWKVLPQGMKNSPTLCQKFVDKAILTVRDKYQDSYIVHYMDDILLAHPSRSIVDEILTSMIQALNKHGLVVSTEKIQKYDNLKYLGTHIQGDSVSYQKLQIRTDKLRTLNDFQKLLGNINWIRPFLKLTTGELKPLFEILNGDSNPISTRKLTPEACKALQLMNERLSTARVKRLDLSQPWSLCILKTEYTPTACLWQDGVVEWIHLPHISPKVITPYDIFCTQLIIKGRHRSKELFSKDPDYIVVPYTKVQFDLLLQEKEDWPISLLGFLGEVHFHLPKDPLLTFTLQTAIIFPHMTSTTPLEKGIVIFTDGSANGRSVTYIQGREPIIKENTQNTAQQAEIVAVITAFEEVSQPFNLYTDSKYVTGLFPEIETATLSPRTKIYTELKHLQRLIHKRQEKFYIGHIRGHTGLPGPLAQGNAYADSLTRILTAGKRTADGSEFEKRTADGSEFESPKKKAKVE

SEQ ID NO: 3302 - protein, 2028 aa, synthetic construct
  source 1..2028: note = Description of Artificial Sequence: Synthetic polypeptide
MPAAKRVKLDGGDKKYSIGLDIGTNSVGWAVITDEYKVPSKKFKVLGNTDRHSIKKNLIGALLFDSGETAEATRLKRTARRRYTRRKNRICYLQEIFSNEMAKVDDSFFHRLEESFLVEEDKKHERHPIFGNIVDEVAYHEKYPTIYHLRKKLVDSTDKADLRLIYLALAHMIKFRGHFLIEGDLNPDNSDVDKLFIQLVQTYNQLFEENPINASGVDAKAILSARLSKSRRLENLIAQLPGEKKNGLFGNLIALSLGLTPNFKSNFDLAEDAKLQLSKDTYDDDLDNLLAQIGDQYADLFLAAKNLSDAILLSDILRVNTEITKAPLSASMIKRYDEHHQDLTLLKALVRQQLPEKYKEIFFDQSKNGYAGYIDGGASQEEFYKFIKPILEKMDGTEELLVKLNREDLLRKQRTFDNGSIPHQIHLGELHAILRRQEDFYPFLKDNREKIEKILTFRIPYYVGPLARGNSRFAWMTRKSEETITPWNFEEVVDKGASAQSFIERMTNFDKNLPNEKVLPKHSLLYEYFTVYNELTKVKYVTEGMRKPAFLSGEQKKAIVDLLFKTNRKVTVKQLKEDYFKKIECFDSVEISGVEDRFNASLGTYHDLLKIIKDKDFLDNEENEDILEDIVLTLTLFEDREMIEERLKTYAHLFDDKVMKQLKRRRYTGWGRLSRKLINGIRDKQSGKTILDFLKSDGFANRNFMQLIHDDSLTFKEDIQKAQVSGQGDSLHEHIANLAGSPAIKKGILQTVKVVDELVKVMGRHKPENIVIEMARENQTTQKGQKNSRERMKRIEEGIKELGSQILKEHPVENTQLQNEKLYLYYLQNGRDMYVDQELDINRLSDYDVDHIVPQSFLKDDSIDNKVLTRSDKARGKSDNVPSEEVVKKMKNYWRQLLNAKLITQRKFDNLTKAERGGLSELDKAGFIKRQLVETRQITKHVAQILDSRMNTKYDENDKLIREVKVITLKSKLVSDFRKDFQFYKVREINNYHHAHDAYLNAVVGTALIKKYPKLESEFVYGDYKVYDVRKMIAKSEQEIGKATAKYFFYSNIMNFFKTEITLANGEIRKRPLIETNGETGEIVWDKGRDFATVRKVLSMPQVNIVKKTEVQTGGFSKESILPKRNSDKLIARKKDWDPKKYGGFDSPTVAYSVLVVAKVEKGKSKKLKSVKELLGITIMERSSFEKNPIDFLEAKGYKEVKKDLIIKLPKYSLFELENGRKRMLASAGELQKGNELALPSKYVNFLYLASHYEKLKGSPEDNEQKQLFVEQHKHYLDEIIEQISEFSKRVILADANLDKVLSAYNKHRDKPIREQAENIIHLFTLTNLGAPAAFKYFDTTIDRKRYTSTKEVLDATLIHQSITGLYETRIDLSQLGGDGGGGSGGSGGSGGSGGSGGGRDIMKDIKVRLMTDSPDDSQDLMIGAIESNLFADQISWKSDQPVWLNQWPLKQEKLQALQQLVTEQLQLGHLEESNSPWNTPVFVIKKKSGKWRLLQDLRAVNATMHDMGALQPGLPSPVAVPKGWEIIIIDLQDCFFNIKLHPEDCKRFAFSVPSPNFKRPYQRFQWKVLPQGMKNSPTLCQKFVDKAILTVRDKYQDSYIVHYMDDILLAHPSRSIVDEILTSMIQALNKHGLVVSTEKIQKYDNLKYLGTHIQGDSVSYQKLQIRTDKLRTLNDFQKLLGNINWIRPFLKLTTGELKPLFEILNGDSNPISTRKLTPEACKALQLMNERLSTARVKRLDLSQPWSLCILKTEYTPTACLWQDGVVEWIHLPHISPKVITPYDIFCTQLIIKGRHRSKELFSKDPDYIVVPYTKVQFDLLLQEKEDWPISLLGFLGEVHFHLPKDPLLTFTLQTAIIFPHMTSTTPLEKGIVIFTDGSANGRSVTYIQGREPIIKENTQNTAQQAEIVAVITAFEEVSQPFNLYTDSKYVTGLFPEIETATLSPRTKIYTELKHLQRLIHKRQEKFYIGHIRGHTGLPGPLAQGNAYADSLTRILTAGKRTADGSEFEKRTADGSEFESPKKKAKVE

SEQ ID NO: 3303 - protein, 2028 aa, synthetic construct
  source 1..2028: note = Description of Artificial Sequence: Synthetic polypeptide
MPAAKRVKLDGGDKKYSIGLDIGTNSVGWAVITDEYKVPSKKFKVLGNTDRHSIKKNLIGALLFDSGETAEATRLKRTARRRYTRRKNRICYLQEIFSNEMAKVDDSFFHRLEESFLVEEDKKHERHPIFGNIVDEVAYHEKYPTIYHLRKKLVDSTDKADLRLIYLALAHMIKFRGHFLIEGDLNPDNSDVDKLFIQLVQTYNQLFEENPINASGVDAKAILSARLSKSRRLENLIAQLPGEKKNGLFGNLIALSLGLTPNFKSNFDLAEDAKLQLSKDTYDDDLDNLLAQIGDQYADLFLAAKNLSDAILLSDILRVNTEITKAPLSASMIKRYDEHHQDLTLLKALVRQQLPEKYKEIFFDQSKNGYAGYIDGGASQEEFYKFIKPILEKMDGTEELLVKLNREDLLRKQRTFDNGSIPHQIHLGELHAILRRQEDFYPFLKDNREKIEKILTFRIPYYVGPLARGNSRFAWMTRKSEETITPWNFEEVVDKGASAQSFIERMTNFDKNLPNEKVLPKHSLLYEYFTVYNELTKVKYVTEGMRKPAFLSGEQKKAIVDLLFKTNRKVTVKQLKEDYFKKIECFDSVEISGVEDRFNASLGTYHDLLKIIKDKDFLDNEENEDILEDIVLTLTLFEDREMIEERLKTYAHLFDDKVMKQLKRRRYTGWGRLSRKLINGIRDKQSGKTILDFLKSDGFANRNFMQLIHDDSLTFKEDIQKAQVSGQGDSLHEHIANLAGSPAIKKGILQTVKVVDELVKVMGRHKPENIVIEMARENQTTQKGQKNSRERMKRIEEGIKELGSQILKEHPVENTQLQNEKLYLYYLQNGRDMYVDQELDINRLSDYDVDHIVPQSFLKDDSIDNKVLTRSDKARGKSDNVPSEEVVKKMKNYWRQLLNAKLITQRKFDNLTKAERGGLSELDKAGFIKRQLVETRQITKHVAQILDSRMNTKYDENDKLIREVKVITLKSKLVSDFRKDFQFYKVREINNYHHAHDAYLNAVVGTALIKKYPKLESEFVYGDYKVYDVRKMIAKSEQEIGKATAKYFFYSNIMNFFKTEITLANGEIRKRPLIETNGETGEIVWDKGRDFATVRKVLSMPQVNIVKKTEVQTGGFSKESILPKRNSDKLIARKKDWDPKKYGGFDSPTVAYSVLVVAKVEKGKSKKLKSVKELLGITIMERSSFEKNPIDFLEAKGYKEVKKDLIIKLPKYSLFELENGRKRMLASAGELQKGNELALPSKYVNFLYLASHYEKLKGSPEDNEQKQLFVEQHKHYLDEIIEQISEFSKRVILADANLDKVLSAYNKHRDKPIREQAENIIHLFTLTNLGAPAAFKYFDTTIDRKRYTSTKEVLDATLIHQSITGLYETRIDLSQLGGDGGGSSGSSGSSGSSGSSGGGRDIMKDIKVRLMTDSPDDSQDLMIGAIESNLFADQISWKSDQPVWLNQWPLKQEKLQALQQLVTEQLQLGHLEESNSPWNTPVFVIKKKSGKWRLLQDLRAVNATMHDMGALQPGLPSPVAVPKGWEIIIIDLQDCFFNIKLHPEDCKRFAFSVPSPNFKRPYQRFQWKVLPQGMKNSPTLCQKFVDKAILTVRDKYQDSYIVHYMDDILLAHPSRSIVDEILTSMIQALNKHGLVVSTEKIQKYDNLKYLGTHIQGDSVSYQKLQIRTDKLRTLNDFQKLLGNINWIRPFLKLTTGELKPLFEILNGDSNPISTRKLTPEACKALQLMNERLSTARVKRLDLSQPWSLCILKTEYTPTACLWQDGVVEWIHLPHISPKVITPYDIFCTQLIIKGRHRSKELFSKDPDYIVVPYTKVQFDLLLQEKEDWPISLLGFLGEVHFHLPKDPLLTFTLQTAIIFPHMTSTTPLEKGIVIFTDGSANGRSVTYIQGREPIIKENTQNTAQQAEIVAVITAFEEVSQPFNLYTDSKYVTGLFPEIETATLSPRTKIYTELKHLQRLIHKRQEKFYIGHIRGHTGLPGPLAQGNAYADSLTRILTAGKRTADGSEFEKRTADGSEFESPKKKAKVE

SEQ ID NO: 3304 - protein, 2022 aa, synthetic construct; identical to SEQ ID NO: 3221
  source 1..2022: note = Description of Artificial Sequence: Synthetic polypeptide

SEQ ID NO: 3305 - protein, 2022 aa, synthetic construct
  source 1..2022: note = Description of Artificial Sequence: Synthetic polypeptide
MPAAKRVKLDGGDKKYSIGLDIGTNSVGWAVITDEYKVPSKKFKVLGNTDRHSIKKNLIGALLFDSGETAEATRLKRTARRRYTRRKNRICYLQEIFSNEMAKVDDSFFHRLEESFLVEEDKKHERHPIFGNIVDEVAYHEKYPTIYHLRKKLVDSTDKADLRLIYLALAHMIKFRGHFLIEGDLNPDNSDVDKLFIQLVQTYNQLFEENPINASGVDAKAILSARLSKSRRLENLIAQLPGEKKNGLFGNLIALSLGLTPNFKSNFDLAEDAKLQLSKDTYDDDLDNLLAQIGDQYADLFLAAKNLSDAILLSDILRVNTEITKAPLSASMIKRYDEHHQDLTLLKALVRQQLPEKYKEIFFDQSKNGYAGYIDGGASQEEFYKFIKPILEKMDGTEELLVKLNREDLLRKQRTFDNGSIPHQIHLGELHAILRRQEDFYPFLKDNREKIEKILTFRIPYYVGPLARGNSRFAWMTRKSEETITPWNFEEVVDKGASAQSFIERMTNFDKNLPNEKVLPKHSLLYEYFTVYNELTKVKYVTEGMRKPAFLSGEQKKAIVDLLFKTNRKVTVKQLKEDYFKKIECFDSVEISGVEDRFNASLGTYHDLLKIIKDKDFLDNEENEDILEDIVLTLTLFEDREMIEERLKTYAHLFDDKVMKQLKRRRYTGWGRLSRKLINGIRDKQSGKTILDFLKSDGFANRNFMQLIHDDSLTFKEDIQKAQVSGQGDSLHEHIANLAGSPAIKKGILQTVKVVDELVKVMGRHKPENIVIEMARENQTTQKGQKNSRERMKRIEEGIKELGSQILKEHPVENTQLQNEKLYLYYLQNGRDMYVDQELDINRLSDYDVDHIVPQSFLKDDSIDNKVLTRSDKARGKSDNVPSEEVVKKMKNYWRQLLNAKLITQRKFDNLTKAERGGLSELDKAGFIKRQLVETRQITKHVAQILDSRMNTKYDENDKLIREVKVITLKSKLVSDFRKDFQFYKVREINNYHHAHDAYLNAVVGTALIKKYPKLESEFVYGDYKVYDVRKMIAKSEQEIGKATAKYFFYSNIMNFFKTEITLANGEIRKRPLIETNGETGEIVWDKGRDFATVRKVLSMPQVNIVKKTEVQTGGFSKESILPKRNSDKLIARKKDWDPKKYGGFDSPTVAYSVLVVAKVEKGKSKKLKSVKELLGITIMERSSFEKNPIDFLEAKGYKEVKKDLIIKLPKYSLFELENGRKRMLASAGELQKGNELALPSKYVNFLYLASHYEKLKGSPEDNEQKQLFVEQHKHYLDEIIEQISEFSKRVILADANLDKVLSAYNKHRDKPIREQAENIIHLFTLTNLGAPAAFKYFDTTIDRKRYTSTKEVLDATLIHQSITGLYETRIDLSQLGGDGGGSSGGSPAPGGGRDIMKDIKVRLMTDSPDDSQDLMIGAIESNLFADQISWKSDQPVWLNQWPLKQEKLQALQQLVTEQLQLGHLEESNSPWNTPVFVIKKKSGKWRLLQDLRAVNATMHDMGALQPGLPSPVAVPKGWEIIIIDLQDCFFNIKLHPEDCKRFAFSVPSPNFKRPYQRFQWKVLPQGMKNSPTLCQKFVDKAILTVRDKYQDSYIVHYMDDILLAHPSRSIVDEILTSMIQALNKHGLVVSTEKIQKYDNLKYLGTHIQGDSVSYQKLQIRTDKLRTLNDFQKLLGNINWIRPFLKLTTGELKPLFEILNGDSNPISTRKLTPEACKALQLMNERLSTARVKRLDLSQPWSLCILKTEYTPTACLWQDGVVEWIHLPHISPKVITPYDIFCTQLIIKGRHRSKELFSKDPDYIVVPYTKVQFDLLLQEKEDWPISLLGFLGEVHFHLPKDPLLTFTLQTAIIFPHMTSTTPLEKGIVIFTDGSANGRSVTYIQGREPIIKENTQNTAQQAEIVAVITAFEEVSQPFNLYTDSKYVTGLFPEIETATLSPRTKIYTELKHLQRLIHKRQEKFYIGHIRGHTGLPGPLAQGNAYADSLTRILTAGKRTADGSEFEKRTADGSEFESPKKKAKVE

SEQ ID NO: 3306 - protein, 2024 aa, synthetic construct
  source 1..2024: note = Description of Artificial Sequence: Synthetic polypeptide
MPAAKRVKLDGGDKKYSIGLDIGTNSVGWAVITDEYKVPSKKFKVLGNTDRHSIKKNLIGALLFDSGETAEATRLKRTARRRYTRRKNRICYLQEIFSNEMAKVDDSFFHRLEESFLVEEDKKHERHPIFGNIVDEVAYHEKYPTIYHLRKKLVDSTDKADLRLIYLALAHMIKFRGHFLIEGDLNPDNSDVDKLFIQLVQTYNQLFEENPINASGVDAKAILSARLSKSRRLENLIAQLPGEKKNGLFGNLIALSLGLTPNFKSNFDLAEDAKLQLSKDTYDDDLDNLLAQIGDQYADLFLAAKNLSDAILLSDILRVNTEITKAPLSASMIKRYDEHHQDLTLLKALVRQQLPEKYKEIFFDQSKNGYAGYIDGGASQEEFYKFIKPILEKMDGTEELLVKLNREDLLRKQRTFDNGSIPHQIHLGELHAILRRQEDFYPFLKDNREKIEKILTFRIPYYVGPLARGNSRFAWMTRKSEETITPWNFEEVVDKGASAQSFIERMTNFDKNLPNEKVLPKHSLLYEYFTVYNELTKVKYVTEGMRKPAFLSGEQKKAIVDLLFKTNRKVTVKQLKEDYFKKIECFDSVEISGVEDRFNASLGTYHDLLKIIKDKDFLDNEENEDILEDIVLTLTLFEDREMIEERLKTYAHLFDDKVMKQLKRRRYTGWGRLSRKLINGIRDKQSGKTILDFLKSDGFANRNFMQLIHDDSLTFKEDIQKAQVSGQGDSLHEHIANLAGSPAIKKGILQTVKVVDELVKVMGRHKPENIVIEMARENQTTQKGQKNSRERMKRIEEGIKELGSQILKEHPVENTQLQNEKLYLYYLQNGRDMYVDQELDINRLSDYDVDHIVPQSFLKDDSIDNKVLTRSDKARGKSDNVPSEEVVKKMKNYWRQLLNAKLITQRKFDNLTKAERGGLSELDKAGFIKRQLVETRQITKHVAQILDSRMNTKYDENDKLIREVKVITLKSKLVSDFRKDFQFYKVREINNYHHAHDAYLNAVVGTALIKKYPKLESEFVYGDYKVYDVRKMIAKSEQEIGKATAKYFFYSNIMNFFKTEITLANGEIRKRPLIETNGETGEIVWDKGRDFATVRKVLSMPQVNIVKKTEVQTGGFSKESILPKRNSDKLIARKKDWDPKKYGGFDSPTVAYSVLVVAKVEKGKSKKLKSVKELLGITIMERSSFEKNPIDFLEAKGYKEVKKDLIIKLPKYSLFELENGRKRMLASAGELQKGNELALPSKYVNFLYLASHYEKLKGSPEDNEQKQLFVEQHKHYLDEIIEQISEFSKRVILADANLDKVLSAYNKHRDKPIREQAENIIHLFTLTNLGAPAAFKYFDTTIDRKRYTSTKEVLDATLIHQSITGLYETRIDLSQLGGDGGEAAAKGGGGSSGGGRDIMKDIKVRLMTDSPDDSQDLMIGAIESNLFADQISWKSDQPVWLNQWPLKQEKLQALQQLVTEQLQLGHLEESNSPWNTPVFVIKKKSGKWRLLQDLRAVNATMHDMGALQPGLPSPVAVPKGWEIIIIDLQDCFFNIKLHPEDCKRFAFSVPSPNFKRPYQRFQWKVLPQGMKNSPTLCQKFVDKAILTVRDKYQDSYIVHYMDDILLAHPSRSIVDEILTSMIQALNKHGLVVSTEKIQKYDNLKYLGTHIQGDSVSYQKLQIRTDKLRTLNDFQKLLGNINWIRPFLKLTTGELKPLFEILNGDSNPISTRKLTPEACKALQLMNERLSTARVKRLDLSQPWSLCILKTEYTPTACLWQDGVVEWIHLPHISPKVITPYDIFCTQLIIKGRHRSKELFSKDPDYIVVPYTKVQFDLLLQEKEDWPISLLGFLGEVHFHLPKDPLLTFTLQTAIIFPHMTSTTPLEKGIVIFTDGSANGRSVTYIQGREPIIKENTQNTAQQAEIVAVITAFEEVSQPFNLYTDSKYVTGLFPEIETATLSPRTKIYTELKHLQRLIHKRQEKFYIGHIRGHTGLPGPLAQGNAYADSLTRILTAGKRTADGSEFEKRTADGSEFESPKKKAKVE

SEQ ID NO: 3307 - protein, 2021 aa, synthetic construct
  source 1..2021: note = Description of Artificial Sequence: Synthetic polypeptide
MPAAKRVKLDGGDKKYSIGLDIGTNSVGWAVITDEYKVPSKKFKVLGNTDRHSIKKNLIGALLFDSGETAEATRLKRTARRRYTRRKNRICYLQEIFSNEMAKVDDSFFHRLEESFLVEEDKKHERHPIFGNIVDEVAYHEKYPTIYHLRKKLVDSTDKADLRLIYLALAHMIKFRGHFLIEGDLNPDNSDVDKLFIQLVQTYNQLFEENPINASGVDAKAILSARLSKSRRLENLIAQLPGEKKNGLFGNLIALSLGLTPNFKSNFDLAEDAKLQLSKDTYDDDLDNLLAQIGDQYADLFLAAKNLSDAILLSDILRVNTEITKAPLSASMIKRYDEHHQDLTLLKALVRQQLPEKYKEIFFDQSKNGYAGYIDGGASQEEFYKFIKPILEKMDGTEELLVKLNREDLLRKQRTFDNGSIPHQIHLGELHAILRRQEDFYPFLKDNREKIEKILTFRIPYYVGPLARGNSRFAWMTRKSEETITPWNFEEVVDKGASAQSFIERMTNFDKNLPNEKVLPKHSLLYEYFTVYNELTKVKYVTEGMRKPAFLSGEQKKAIVDLLFKTNRKVTVKQLKEDYFKKIECFDSVEISGVEDRFNASLGTYHDLLKIIKDKDFLDNEENEDILEDIVLTLTLFEDREMIEERLKTYAHLFDDKVMKQLKRRRYTGWGRLSRKLINGIRDKQSGKTILDFLKSDGFANRNFMQLIHDDSLTFKEDIQKAQVSGQGDSLHEHIANLAGSPAIKKGILQTVKVVDELVKVMGRHKPENIVIEMARENQTTQKGQKNSRERMKRIEEGIKELGSQILKEHPVENTQLQNEKLYLYYLQNGRDMYVDQELDINRLSDYDVDHIVPQSFLKDDSIDNKVLTRSDKARGKSDNVPSEEVVKKMKNYWRQLLNAKLITQRKFDNLTKAERGGLSELDKAGFIKRQLVETRQITKHVAQILDSRMNTKYDENDKLIREVKVITLKSKLVSDFRKDFQFYKVREINNYHHAHDAYLNAVVGTALIKKYPKLESEFVYGDYKVYDVRKMIAKSEQEIGKATAKYFFYSNIMNFFKTEITLANGEIRKRPLIETNGETGEIVWDKGRDFATVRKVLSMPQVNIVKKTEVQTGGFSKESILPKRNSDKLIARKKDWDPKKYGGFDSPTVAYSVLVVAKVEKGKSKKLKSVKELLGITIMERSSFEKNPIDFLEAKGYKEVKKDLIIKLPKYSLFELENGRKRMLASAGELQKGNELALPSKYVNFLYLASHYEKLKGSPEDNEQKQLFVEQHKHYLDEIIEQISEFSKRVILADANLDKVLSAYNKHRDKPIREQAENIIHLFTLTNLGAPAAFKYFDTTIDRKRYTSTKEVLDATLIHQSITGLYETRIDLSQLGGDGGGSSEAAAKGGGRDIMKDIKVRLMTDSPDDSQDLMIGAIESNLFADQISWKSDQPVWLNQWPLKQEKLQALQQLVTEQLQLGHLEESNSPWNTPVFVIKKKSGKWRLLQDLRAVNATMHDMGALQPGLPSPVAVPKGWEIIIIDLQDCFFNIKLHPEDCKRFAFSVPSPNFKRPYQRFQWKVLPQGMKNSPTLCQKFVDKAILTVRDKYQDSYIVHYMDDILLAHPSRSIVDEILTSMIQALNKHGLVVSTEKIQKYDNLKYLGTHIQGDSVSYQKLQIRTDKLRTLNDFQKLLGNINWIRPFLKLTTGELKPLFEILNGDSNPISTRKLTPEACKALQLMNERLSTARVKRLDLSQPWSLCILKTEYTPTACLWQDGVVEWIHLPHISPKVITPYDIFCTQLIIKGRHRSKELFSKDPDYIVVPYTKVQFDLLLQEKEDWPISLLGFLGEVHFHLPKDPLLTFTLQTAIIFPHMTSTTPLEKGIVIFTDGSANGRSVTYIQGREPIIKENTQNTAQQAEIVAVITAFEEVSQPFNLYTDSKYVTGLFPEIETATLSPRTKIYTELKHLQRLIHKRQEKFYIGHIRGHTGLPGPLAQGNAYADSLTRILTAGKRTADGSEFEKRTADGSEFESPKKKAKVE

SEQ ID NO: 3308 - protein, 2022 aa, synthetic construct; identical to SEQ ID NO: 3224
  source 1..2022: note = Description of Artificial Sequence: Synthetic polypeptide

SEQ ID NO: 3309 - protein, 2024 aa, synthetic construct
  source 1..2024: note = Description of Artificial Sequence: Synthetic polypeptide
MPAAKRVKLDGGDKKYSIGLDIGTNSVGWAVITDEYKVPSKKFKVLGNTDRHSIKKNLIGALLFDSGETAEATRLKRTARRRYTRRKNRICYLQEIFSNEMAKVDDSFFHRLEESFLVEEDKKHERHPIFGNIVDEVAYHEKYPTIYHLRKKLVDSTDKADLRLIYLALAHMIKFRGHFLIEGDLNPDNSDVDKLFIQLVQTYNQLFEENPINASGVDAKAILSARLSKSRRLENLIAQLPGEKKNGLFGNLIALSLGLTPNFKSNFDLAEDAKLQLSKDTYDDDLDNLLAQIGDQYADLFLAAKNLSDAILLSDILRVNTEITKAPLSASMIKRYDEHHQDLTLLKALVRQQLPEKYKEIFFDQSKNGYAGYIDGGASQEEFYKFIKPILEKMDGTEELLVKLNREDLLRKQRTFDNGSIPHQIHLGELHAILRRQEDFYPFLKDNREKIEKILTFRIPYYVGPLARGNSRFAWMTRKSEETITPWNFEEVVDKGASAQSFIERMTNFDKNLPNEKVLPKHSLLYEYFTVYNELTKVKYVTEGMRKPAFLSGEQKKAIVDLLFKTNRKVTVKQLKEDYFKKIECFDSVEISGVEDRFNASLGTYHDLLKIIKDKDFLDNEENEDILEDIVLTLTLFEDREMIEERLKTYAHLFDDKVMKQLKRRRYTGWGRLSRKLINGIRDKQSGKTILDFLKSDGFANRNFMQLIHDDSLTFKEDIQKAQVSGQGDSLHEHIANLAGSPAIKKGILQTVKVVDELVKVMGRHKPENIVIEMARENQTTQKGQKNSRERMKRIEEGIKELGSQILKEHPVENTQLQNEKLYLYYLQNGRDMYVDQELDINRLSDYDVDHIVPQSFLKDDSIDNKVLTRSDKARGKSDNVPSEEVVKKMKNYWRQLLNAKLITQRKFDNLTKAERGGLSELDKAGFIKRQLVETRQITKHVAQILDSRMNTKYDENDKLIREVKVITLKSKLVSDFRKDFQFYKVREINNYHHAHDAYLNAVVGTALIKKYPKLESEFVYGDYKVYDVRKMIAKSEQEIGKATAKYFFYSNIMNFFKTEITLANGEIRKRPLIETNGETGEIVWDKGRDFATVRKVLSMPQVNIVKKTEVQTGGFSKESILPKRNSDKLIARKKDWDPKKYGGFDSPTVAYSVLVVAKVEKGKSKKLKSVKELLGITIMERSSFEKNPIDFLEAKGYKEVKKDLIIKLPKYSLFELENGRKRMLASAGELQKGNELALPSKYVNFLYLASHYEKLKGSPEDNEQKQLFVEQHKHYLDEIIEQISEFSKRVILADANLDKVLSAYNKHRDKPIREQAENIIHLFTLTNLGAPAAFKYFDTTIDRKRYTSTKEVLDATLIHQSITGLYETRIDLSQLGGDGGPAPAPAPAPAPGGGRDIMKDIKVRLMTDSPDDSQDLMIGAIESNLFADQISWKSDQPVWLNQWPLKQEKLQALQQLVTEQLQLGHLEESNSPWNTPVFVIKKKSGKWRLLQDLRAVNATMHDMGALQPGLPSPVAVPKGWEIIIIDLQDCFFNIKLHPEDCKRFAFSVPSPNFKRPYQRFQWKVLPQGMKNSPTLCQKFVDKAILTVRDKYQDSYIVHYMDDILLAHPSRSIVDEILTSMIQALNKHGLVVSTEKIQKYDNLKYLGTHIQGDSVSYQKLQIRTDKLRTLNDFQKLLGNINWIRPFLKLTTGELKPLFEILNGDSNPISTRKLTPEACKALQLMNERLSTARVKRLDLSQPWSLCILKTEYTPTACLWQDGVVEWIHLPHISPKVITPYDIFCTQLIIKGRHRSKELFSKDPDYIVVPYTKVQFDLLLQEKEDWPISLLGFLGEVHFHLPKDPLLTFTLQTAIIFPHMTSTTPLEKGIVIFTDGSANGRSVTYIQGREPIIKENTQNTAQQAEIVAVITAFEEVSQPFNLYTDSKYVTGLFPEIETATLSPRTKIYTELKHLQRLIHKRQEKFYIGHIRGHTGLPGPLAQGNAYADSLTRILTAGKRTADGSEFEKRTADGSEFESPKKKAKVE

SEQ ID NO: 3310 - protein, 2024 aa, synthetic construct
  source 1..2024: note = Description of Artificial Sequence: Synthetic polypeptide
MPAAKRVKLDGGDKKYSIGLDIGTNSVGWAVITDEYKVPSKKFKVLGNTDRHSIKKNLIGALLFDSGETAEATRLKRTARRRYTRRKNRICYLQEIFSNEMAKVDDSFFHRLEESFLVEEDKKHERHPIFGNIVDEVAYHEKYPTIYHLRKKLVDSTDKADLRLIYLALAHMIKFRGHFLIEGDLNPDNSDVDKLFIQLVQTYNQLFEENPINASGVDAKAILSARLSKSRRLENLIAQLPGEKKNGLFGNLIALSLGLTPNFKSNFDLAEDAKLQLSKDTYDDDLDNLLAQIGDQYADLFLAAKNLSDAILLSDILRVNTEITKAPLSASMIKRYDEHHQDLTLLKALVRQQLPEKYKEIFFDQSKNGYAGYIDGGASQEEFYKFIKPILEKMDGTEELLVKLNREDLLRKQRTFDNGSIPHQIHLGELHAILRRQEDFYPFLKDNREKIEKILTFRIPYYVGPLARGNSRFAWMTRKSEETITPWNFEEVVDKGASAQSFIERMTNFDKNLPNEKVLPKHSLLYEYFTVYNELTKVKYVTEGMRKPAFLSGEQKKAIVDLLFKTNRKVTVKQLKEDYFKKIECFDSVEISGVEDRFNASLGTYHDLLKIIKDKDFLDNEENEDILEDIVLTLTLFEDREMIEERLKTYAHLFDDKVMKQLKRRRYTGWGRLSRKLINGIRDKQSGKTILDFLKSDGFANRNFMQLIHDDSLTFKEDIQKAQVSGQGDSLHEHIANLAGSPAIKKGILQTVKVVDELVKVMGRHKPENIVIEMARENQTTQKGQKNSRERMKRIEEGIKELGSQILKEHPVENTQLQNEKLYLYYLQNGRDMYVDQELDINRLSDYDVDHIVPQSFLKDDSIDNKVLTRSDKARGKSDNVPSEEVVKKMKNYWRQLLNAKLITQRKFDNLTKAERGGLSELDKAGFIKRQLVETRQITKHVAQILDSRMNTKYDENDKLIREVKVITLKSKLVSDFRKDFQFYKVREINNYHHAHDAYLNAVVGTALIKKYPKLESEFVYGDYKVYDVRKMIAKSEQEIGKATAKYFFYSNIMNFFKTEITLANGEIRKRPLIETNGETGEIVWDKGRDFATVRKVLSMPQVNIVKKTEVQTGGFSKESILPKRNSDKLIARKKDWDPKKYGGFDSPTVAYSVLVVAKVEKGKSKKLKSVKELLGITIMERSSFEKNPIDFLEAKGYKEVKKDLIIKLPKYSLFELENGRKRMLASAGELQKGNELALPSKYVNFLYLASHYEKLKGSPEDNEQKQLFVEQHKHYLDEIIEQISEFSKRVILADANLDKVLSAYNKHRDKPIREQAENIIHLFTLTNLGAPAAFKYFDTTIDRKRYTSTKEVLDATLIHQSITGLYETRIDLSQLGGDGGGSSEAAAKGGSGGGRDIMKDIKVRLMTDSPDDSQDLMIGAIESNLFADQISWKSDQPVWLNQWPLKQEKLQALQQLVTEQLQLGHLEESNSPWNTPVFVIKKKSGKWRLLQDLRAVNATMHDMGALQPGLPSPVAVPKGWEIIIIDLQDCFFNIKLHPEDCKRFAFSVPSPNFKRPYQRFQWKVLPQGMKNSPTLCQKFVDKAILTVRDKYQDSYIVHYMDDILLAHPSRSIVDEILTSMIQALNKHGLVVSTEKIQKYDNLKYLGTHIQGDSVSYQKLQIRTDKLRTLNDFQKLLGNINWIRPFLKLTTGELKPLFEILNGDSNPISTRKLTPEACKALQLMNERLSTARVKRLDLSQPWSLCILKTEYTPTACLWQDGVVEWIHLPHISPKVITPYDIFCTQLIIKGRHRSKELFSKDPDYIVVPYTKVQFDLLLQEKEDWPISLLGFLGEVHFHLPKDPLLTFTLQTAIIFPHMTSTTPLEKGIVIFTDGSANGRSVTYIQGREPIIKENTQNTAQQAEIVAVITAFEEVSQPFNLYTDSKYVTGLFPEIETATLSPRTKIYTELKHLQRLIHKRQEKFYIGHIRGHTGLPGPLAQGNAYADSLTRILTAGKRTADGSEFEKRTADGSEFESPKKKAKVE

SEQ ID NO: 3311 - protein, 2024 aa, synthetic construct
  source 1..2024: note = Description of Artificial Sequence: Synthetic polypeptide
MPAAKRVKLDGGDKKYSIGLDIGTNSVGWAVITDEYKVPSKKFKVLGNTDRHSIKKNLIGALLFDSGETAEATRLKRTARRRYTRRKNRICYLQEIFSNEMAKVDDSFFHRLEESFLVEEDKKHERHPIFGNIVDEVAYHEKYPTIYHLRKKLVDSTDKADLRLIYLALAHMIKFRGHFLIEGDLNPDNSDVDKLFIQLVQTYNQLFEENPINASGVDAKAILSARLSKSRRLENLIAQLPGEKKNGLFGNLIALSLGLTPNFKSNFDLAEDAKLQLSKDTYDDDLDNLLAQIGDQYADLFLAAKNLSDAILLSDILRVNTEITKAPLSASMIKRYDEHHQDLTLLKALVRQQLPEKYKEIFFDQSKNGYAGYIDGGASQEEFYKFIKPILEKMDGTEELLVKLNREDLLRKQRTFDNGSIPHQIHLGELHAILRRQEDFYPFLKDNREKIEKILTFRIPYYVGPLARGNSRFAWMTRKSEETITPWNFEEVVDKGASAQSFIERMTNFDKNLPNEKVLPKHSLLYEYFTVYNELTKVKYVTEGMRKPAFLSGEQKKAIVDLLFKTNRKVTVKQLKEDYFKKIECFDSVEISGVEDRFNASLGTYHDLLKIIKDKDFLDNEENEDILEDIVLTLTLFEDREMIEERLKTYAHLFDDKVMKQLKRRRYTGWGRLSRKLINGIRDKQSGKTILDFLKSDGFANRNFMQLIHDDSLTFKEDIQKAQVSGQGDSLHEHIANLAGSPAIKKGILQTVKVVDELVKVMGRHKPENIVIEMARENQTTQKGQKNSRERMKRIEEGIKELGSQILKEHPVENTQLQNEKLYLYYLQNGRDMYVDQELDINRLSDYDVDHIVPQSFLKDDSIDNKVLTRSDKARGKSDNVPSEEVVKKMKNYWRQLLNAKLITQRKFDNLTKAERGGLSELDKAGFIKRQLVETRQITKHVAQILDSRMNTKYDENDKLIREVKVITLKSKLVSDFRKDFQFYKVREINNYHHAHDAYLNAVVGTALIKKYPKLESEFVYGDYKVYDVRKMIAKSEQEIGKATAKYFFYSNIMNFFKTEITLANGEIRKRPLIETNGETGEIVWDKGRDFATVRKVLSMPQVNIVKKTEVQTGGFSKESILPKRNSDKLIARKKDWDPKKYGGFDSPTVAYSVLVVAKVEKGKSKKLKSVKELLGITIMERSSFEKNPIDFLEAKGYKEVKKDLIIKLPKYSLFELENGRKRMLASAGELQKGNELALPSKYVNFLYLASHYEKLKGSPEDNEQKQLFVEQHKHYLDEIIEQISEFSKRVILADANLDKVLSAYNKHRDKPIREQAENIIHLFTLTNLGAPAAFKYFDTTIDRKRYTSTKEVLDATLIHQSITGLYETRIDLSQLGGDGGGGGGSSEAAAKGGGRDIMKDIKVRLMTDSPDDSQDLMIGAIESNLFADQISWKSDQPVWLNQWPLKQEKLQALQQLVTEQLQLGHLEESNSPWNTPVFVIKKKSGKWRLLQDLRAVNATMHDMGALQPGLPSPVAVPKGWEIIIIDLQDCFFNIKLHPEDCKRFAFSVPSPNFKRPYQRFQWKVLPQGMKNSPTLCQKFVDKAILTVRDKYQDSYIVHYMDDILLAHPSRSIVDEILTSMIQALNKHGLVVSTEKIQKYDNLKYLGTHIQGDSVSYQKLQIRTDKLRTLNDFQKLLGNINWIRPFLKLTTGELKPLFEILNGDSNPISTRKLTPEACKALQLMNERLSTARVKRLDLSQPWSLCILKTEYTPTACLWQDGVVEWIHLPHISPKVITPYDIFCTQLIIKGRHRSKELFSKDPDYIVVPYTKVQFDLLLQEKEDWPISLLGFLGEVHFHLPKDPLLTFTLQTAIIFPHMTSTTPLEKGIVIFTDGSANGRSVTYIQGREPIIKENTQNTAQQAEIVAVITAFEEVSQPFNLYTDSKYVTGLFPEIETATLSPRTKIYTELKHLQRLIHKRQEKFYIGHIRGHTGLPGPLAQGNAYADSLTRILTAGKRTADGSEFEKRTADGSEFESPKKKAKVE

SEQ ID NO: 3312 - protein, 2022 aa, synthetic construct; identical to SEQ ID NO: 3229
  source 1..2022: note = Description of Artificial Sequence: Synthetic polypeptide

SEQ ID NO: 3313 - protein, 2021 aa, synthetic construct; identical to SEQ ID NO: 3208
  source 1..2021: note = Description of Artificial Sequence: Synthetic polypeptide

SEQ ID NO: 3314 - protein, 2024 aa, synthetic construct
  source 1..2024: note = Description of Artificial Sequence: Synthetic polypeptide
MPAAKRVKLDGGDKKYSIGLDIGTNSVGWAVITDEYKVPSKKFKVLGNTDRHSIKKNLIGALLFDSGETAEATRLKRTARRRYTRRKNRICYLQEIFSNEMAKVDDSFFHRLEESFLVEEDKKHERHPIFGNIVDEVAYHEKYPTIYHLRKKLVDSTDKADLRLIYLALAHMIKFRGHFLIEGDLNPDNSDVDKLFIQLVQTYNQLFEENPINASGVDAKAILSARLSKSRRLENLIAQLPGEKKNGLFGNLIALSLGLTPNFKSNFDLAEDAKLQLSKDTYDDDLDNLLAQIGDQYADLFLAAKNLSDAILLSDILRVNTEITKAPLSASMIKRYDEHHQDLTLLKALVRQQLPEKYKEIFFDQSKNGYAGYIDGGASQEEFYKFIKPILEKMDGTEELLVKLNREDLLRKQRTFDNGSIPHQIHLGELHAILRRQEDFYPFLKDNREKIEKILTFRIPYYVGPLARGNSRFAWMTRKSEETITPWNFEEVVDKGASAQSFIERMTNFDKNLPNEKVLPKHSLLYEYFTVYNELTKVKYVTEGMRKPAFLSGEQKKAIVDLLFKTNRKVTVKQLKEDYFKKIECFDSVEISGVEDRFNASLGTYHDLLKIIKDKDFLDNEENEDILEDIVLTLTLFEDREMIEERLKTYAHLFDDKVMKQLKRRRYTGWGRLSRKLINGIRDKQSGKTILDFLKSDGFANRNFMQLIHDDSLTFKEDIQKAQVSGQGDSLHEHIANLAGSPAIKKGILQTVKVVDELVKVMGRHKPENIVIEMARENQTTQKGQKNSRERMKRIEEGIKELGSQILKEHPVENTQLQNEKLYLYYLQNGRDMYVDQELDINRLSDYDVDHIVPQSFLKDDSIDNKVLTRSDKARGKSDNVPSEEVVKKMKNYWRQLLNAKLITQRKFDNLTKAERGGLSELDKAGFIKRQLVETRQITKHVAQILDSRMNTKYDENDKLIREVKVITLKSKLVSDFRKDFQFYKVREINNYHHAHDAYLNAVVGTALIKKYPKLESEFVYGDYKVYDVRKMIAKSEQEIGKATAKYFFYSNIMNFFKTEITLANGEIRKRPLIETNGETGEIVWDKGRDFATVRKVLSMPQVNIVKKTEVQTGGFSKESILPKRNSDKLIARKKDWDPKKYGGFDSPTVAYSVLVVAKVEKGKSKKLKSVKELLGITIMERSSFEKNPIDFLEAKGYKEVKKDLIIKLPKYSLFELENGRKRMLASAGELQKGNELALPSKYVNFLYLASHYEKLKGSPEDNEQKQLFVEQHKHYLDEIIEQISEFSKRVILADANLDKVLSAYNKHRDKPIREQAENIIHLFTLTNLGAPAAFKYFDTTIDRKRYTSTKEVLDATLIHQSITGLYETRIDLSQLGGDGGGSSGGSEAAAKGGGRDIMKDIKVRLMTDSPDDSQDLMIGAIESNLFADQISWKSDQPVWLNQWPLKQEKLQALQQLVTEQLQLGHLEESNSPWNTPVFVIKKKSGKWRLLQDLRAVNATMHDMGALQPGLPSPVAVPKGWEIIIIDLQDCFFNIKLHPEDCKRFAFSVPSPNFKRPYQRFQWKVLPQGMKNSPTLCQKFVDKAILTVRDKYQDSYIVHYMDDILLAHPSRSIVDEILTSMIQALNKHGLVVSTEKIQKYDNLKYLGTHIQGDSVSYQKLQIRTDKLRTLNDFQKLLGNINWIRPFLKLTTGELKPLFEILNGDSNPISTRKLTPEACKALQLMNERLSTARVKRLDLSQPWSLCILKTEYTPTACLWQDGVVEWIHLPHISPKVITPYDIFCTQLIIKGRHRSKELFSKDPDYIVVPYTKVQFDLLLQEKEDWPISLLGFLGEVHFHLPKDPLLTFTLQTAIIFPHMTSTTPLEKGIVIFTDGSANGRSVTYIQGREPIIKENTQNTAQQAEIVAVITAFEEVSQPFNLYTDSKYVTGLFPEIETATLSPRTKIYTELKHLQRLIHKRQEKFYIGHIRGHTGLPGPLAQGNAYADSLTRILTAGKRTADGSEFEKRTADGSEFESPKKKAKVE

SEQ ID NO: 3315 - protein, 2022 aa, synthetic construct; identical to SEQ ID NO: 3199
  source 1..2022: note = Description of Artificial Sequence: Synthetic polypeptide

SEQ ID NO: 3316 - protein, 2022 aa, synthetic construct
  source 1..2022: note = Description of Artificial Sequence: Synthetic polypeptide
MPAAKRVKLDGGDKKYSIGLDIGTNSVGWAVITDEYKVPSKKFKVLGNTDRHSIKKNLIGALLFDSGETAEATRLKRTARRRYTRRKNRICYLQEIFSNEMAKVDDSFFHRLEESFLVEEDKKHERHPIFGNIVDEVAYHEKYPTIYHLRKKLVDSTDKADLRLIYLALAHMIKFRGHFLIEGDLNPDNSDVDKLFIQLVQTYNQLFEENPINASGVDAKAILSARLSKSRRLENLIAQLPGEKKNGLFGNLIALSLGLTPNFKSNFDLAEDAKLQLSKDTYDDDLDNLLAQIGDQYADLFLAAKNLSDAILLSDILRVNTEITKAPLSASMIKRYDEHHQDLTLLKALVRQQLPEKYKEIFFDQSKNGYAGYIDGGASQEEFYKFIKPILEKMDGTEELLVKLNREDLLRKQRTFDNGSIPHQIHLGELHAILRRQEDFYPFLKDNREKIEKILTFRIPYYVGPLARGNSRFAWMTRKSEETITPWNFEEVVDKGASAQSFIERMTNFDKNLPNEKVLPKHSLLYEYFTVYNELTKVKYVTEGMRKPAFLSGEQKKAIVDLLFKTNRKVTVKQLKEDYFKKIECFDSVEISGVEDRFNASLGTYHDLLKIIKDKDFLDNEENEDILEDIVLTLTLFEDREMIEERLKTYAHLFDDKVMKQLKRRRYTGWGRLSRKLINGIRDKQSGKTILDFLKSDGFANRNFMQLIHDDSLTFKEDIQKAQVSGQGDSLHEHIANLAGSPAIKKGILQTVKVVDELVKVMGRHKPENIVIEMARENQTTQKGQKNSRERMKRIEEGIKELGSQILKEHPVENTQLQNEKLYLYYLQNGRDMYVDQELDINRLSDYDVDHIVPQSFLKDDSIDNKVLTRSDKARGKSDNVPSEEVVKKMKNYWRQLLNAKLITQRKFDNLTKAERGGLSELDKAGFIKRQLVETRQITKHVAQILDSRMNTKYDENDKLIREVKVITLKSKLVSDFRKDFQFYKVREINNYHHAHDAYLNAVVGTALIKKYPKLESEFVYGDYKVYDVRKMIAKSEQEIGKATAKYFFYSNIMNFFKTEITLANGEIRKRPLIETNGETGEIVWDKGRDFATVRKVLSMPQVNIVKKTEVQTGGFSKESILPKRNSDKLIARKKDWDPKKYGGFDSPTVAYSVLVVAKVEKGKSKKLKSVKELLGITIMERSSFEKNPIDFLEAKGYKEVKKDLIIKLPKYSLFELENGRKRMLASAGELQKGNELALPSKYVNFLYLASHYEKLKGSPEDNEQKQLFVEQHKHYLDEIIEQISEFSKRVILADANLDKVLSAYNKHRDKPIREQAENIIHLFTLTNLGAPAAFKYFDTTIDRKRYTSTKEVLDATLIHQSITGLYETRIDLSQLGGDGGGGSGGSGGSGGGRDIMKDIKVRLMTDSPDDSQDLMIGAIESNLFADQISWKSDQPVWLNQWPLKQEKLQALQQLVTEQLQLGHLEESNSPWNTPVFVIKKKSGKWRLLQDLRAVNATMHDMGALQPGLPSPVAVPKGWEIIIIDLQDCFFNIKLHPEDCKRFAFSVPSPNFKRPYQRFQWKVLPQGMKNSPTLCQKFVDKAILTVRDKYQDSYIVHYMDDILLAHPSRSIVDEILTSMIQALNKHGLVVSTEKIQKYDNLKYLGTHIQGDSVSYQKLQIRTDKLRTLNDFQKLLGNINWIRPFLKLTTGELKPLFEILNGDSNPISTRKLTPEACKALQLMNERLSTARVKRLDLSQPWSLCILKTEYTPTACLWQDGVVEWIHLPHISPKVITPYDIFCTQLIIKGRHRSKELFSKDPDYIVVPYTKVQFDLLLQEKEDWPISLLGFLGEVHFHLPKDPLLTFTLQTAIIFPHMTSTTPLEKGIVIFTDGSANGRSVTYIQGREPIIKENTQNTAQQAEIVAVITAFEEVSQPFNLYTDSKYVTGLFPEIETATLSPRTKIYTELKHLQRLIHKRQEKFYIGHIRGHTGLPGPLAQGNAYADSLTRILTAGKRTADGSEFEKRTADGSEFESPKKKAKVE

SEQ ID NO: 3317 - protein, 2025 aa, synthetic construct
  source 1..2025: note = Description of Artificial Sequence: Synthetic polypeptide
MPAAKRVKLDGGDKKYSIGLDIGTNSVGWAVITDEYKVPSKKFKVLGNTDRHSIKKNLIGALLFDSGETAEATRLKRTARRRYTRRKNRICYLQEIFSNEMAKVDDSFFHRLEESFLVEEDKKHERHPIFGNIVDEVAYHEKYPTIYHLRKKLVDSTDKADLRLIYLALAHMIKFRGHFLIEGDLNPDNSDVDKLFIQLVQTYNQLFEENPINASGVDAKAILSARLSKSRRLENLIAQLPGEKKNGLFGNLIALSLGLTPNFKSNFDLAEDAKLQLSKDTYDDDLDNLLAQIGDQYADLFLAAKNLSDAILLSDILRVNTEITKAPLSASMIKRYDEHHQDLTLLKALVRQQLPEKYKEIFFDQSKNGYAGYIDGGASQEEFYKFIKPILEKMDGTEELLVKLNREDLLRKQRTFDNGSIPHQIHLGELHAILRRQEDFYPFLKDNREKIEKILTFRIPYYVGPLARGNSRFAWMTRKSEETITPWNFEEVVDKGASAQSFIERMTNFDKNLPNEKVLPKHSLLYEYFTVYNELTKVKYVTEGMRKPAFLSGEQKKAIVDLLFKTNRKVTVKQLKEDYFKKIECFDSVEISGVEDRFNASLGTYHDLLKIIKDKDFLDNEENEDILEDIVLTLTLFEDREMIEERLKTYAHLFDDKVMKQLKRRRYTGWGRLSRKLINGIRDKQSGKTILDFLKSDGFANRNFMQLIHDDSLTFKEDIQKAQVSGQGDSLHEHIANLAGSPAIKKGILQTVKVVDELVKVMGRHKPENIVIEMARENQTTQKGQKNSRERMKRIEEGIKELGSQILKEHPVENTQLQNEKLYLYYLQNGRDMYVDQELDINRLSDYDVDHIVPQSFLKDDSIDNKVLTRSDKARGKSDNVPSEEVVKKMKNYWRQLLNAKLITQRKFDNLTKAERGGLSELDKAGFIKRQLVETRQITKHVAQILDSRMNTKYDENDKLIREVKVITLKSKLVSDFRKDFQFYKVREINNYHHAHDAYLNAVVGTALIKKYPKLESEFVYGDYKVYDVRKMIAKSEQEIGKATAKYFFYSNIMNFFKTEITLANGEIRKRPLIETNGETGEIVWDKGRDFATVRKVLSMPQVNIVKKTEVQTGGFSKESILPKRNSDKLIARKKDWDPKKYGGFDSPTVAYSVLVVAKVEKGKSKKLKSVKELLGITIMERSSFEKNPIDFLEAKGYKEVKKDLIIKLPKYSLFELENGRKRMLASAGELQKGNELALPSKYVNFLYLASHYEKLKGSPEDNEQKQLFVEQHKHYLDEIIEQISEFSKRVILADANLDKVLSAYNKHRDKPIREQAENIIHLFTLTNLGAPAAFKYFDTTIDRKRYTSTKEVLDATLIHQSITGLYETRIDLSQLGGDGGGGSGGSGGSGGSGGGRDIMKDIKVRLMTDSPDDSQDLMIGAIESNLFADQISWKSDQPVWLNQWPLKQEKLQALQQLVTEQLQLGHLEESNSPWNTPVFVIKKKSGKWRLLQDLRAVNATMHDMGALQPGLPSPVAVPKGWEIIIIDLQDCFFNIKLHPEDCKRFAFSVPSPNFKRPYQRFQWKVLPQGMKNSPTLCQKFVDKAILTVRDKYQDSYIVHYMDDILLAHPSRSIVDEILTSMIQALNKHGLVVSTEKIQKYDNLKYLGTHIQGDSVSYQKLQIRTDKLRTLNDFQKLLGNINWIRPFLKLTTGELKPLFEILNGDSNPISTRKLTPEACKALQLMNERLSTARVKRLDLSQPWSLCILKTEYTPTACLWQDGVVEWIHLPHISPKVITPYDIFCTQLIIKGRHRSKELFSKDPDYIVVPYTKVQFDLLLQEKEDWPISLLGFLGEVHFHLPKDPLLTFTLQTAIIFPHMTSTTPLEKGIVIFTDGSANGRSVTYIQGREPIIKENTQNTAQQAEIVAVITAFEEVSQPFNLYTDSKYVTGLFPEIETATLSPRTKIYTELKHLQRLIHKRQEKFYIGHIRGHTGLPGPLAQGNAYADSLTRILTAGKRTADGSEFEKRTADGSEFESPKKKAKVE

SEQ ID NO: 3318 - protein, 2024 aa, synthetic construct; identical to SEQ ID NO: 3207
  source 1..2024: note = Description of Artificial Sequence: Synthetic polypeptide

SEQ ID NO: 3319 - protein, 2016 aa, synthetic construct; identical to SEQ ID NO: 3210
  source 1..2016: note = Description of Artificial Sequence: Synthetic polypeptide

SEQ ID NO: 3320 - protein, 2024 aa, synthetic construct
  source 1..2024: note = Description of Artificial Sequence: Synthetic polypeptide
MPAAKRVKLDGGDKKYSIGLDIGTNSVGWAVITDEYKVPSKKFKVLGNTDRHSIKKNLIGALLFDSGETAEATRLKRTARRRYTRRKNRICYLQEIFSNEMAKVDDSFFHRLEESFLVEEDKKHERHPIFGNIVDEVAYHEKYPTIYHLRKKLVDSTDKADLRLIYLALAHMIKFRGHFLIEGDLNPDNSDVDKLFIQLVQTYNQLFEENPINASGVDAKAILSARLSKSRRLENLIAQLPGEKKNGLFGNLIALSLGLTPNFKSNFDLAEDAKLQLSKDTYDDDLDNLLAQIGDQYADLFLAAKNLSDAILLSDILRVNTEITKAPLSASMIKRYDEHHQDLTLLKALVRQQLPEKYKEIFFDQSKNGYAGYIDGGASQEEFYKFIKPILEKMDGTEELLVKLNREDLLRKQRTFDNGSIPHQIHLGELHAILRRQEDFYPFLKDNREKIEKILTFRIPYYVGPLARGNSRFAWMTRKSEETITPWNFEEVVDKGASAQSFIERMTNFDKNLPNEKVLPKHSLLYEYFTVYNELTKVKYVTEGMRKPAFLSGEQKKAIVDLLFKTNRKVTVKQLKEDYFKKIECFDSVEISGVEDRFNASLGTYHDLLKIIKDKDFLDNEENEDILEDIVLTLTLFEDREMIEERLKTYAHLFDDKVMKQLKRRRYTGWGRLSRKLINGIRDKQSGKTILDFLKSDGFANRNFMQLIHDDSLTFKEDIQKAQVSGQGDSLHEHIANLAGSPAIKKGILQTVKVVDELVKVMGRHKPENIVIEMARENQTTQKGQKNSRERMKRIEEGIKELGSQILKEHPVENTQLQNEKLYLYYLQNGRDMYVDQELDINRLSDYDVDHIVPQSFLKDDSIDNKVLTRSDKARGKSDNVPSEEVVKKMKNYWRQLLNAKLITQRKFDNLTKAERGGLSELDKAGFIKRQLVETRQITKHVAQILDSRMNTKYDENDKLIREVKVITLKSKLVSDFRKDFQFYKVREINNYHHAHDAYLNAVVGTALIKKYPKLESEFVYGDYKVYDVRKMIAKSEQEIGKATAKYFFYSNIMNFFKTEITLANGEIRKRPLIETNGETGEIVWDKGRDFATVRKVLSMPQVNIVKKTEVQTGGFSKESILPKRNSDKLIARKKDWDPKKYGGFDSPTVAYSVLVVAKVEKGKSKKLKSVKELLGITIMERSSFEKNPIDFLEAKGYKEVKKDLIIKLPKYSLFELENGRKRMLASAGELQKGNELALPSKYVNFLYLASHYEKLKGSPEDNEQKQLFVEQHKHYLDEIIEQISEFSKRVILADANLDKVLSAYNKHRDKPIREQAENIIHLFTLTNLGAPAAFKYFDTTIDRKRYTSTKEVLDATLIHQSITGLYETRIDLSQLGGDGGGGSPAPEAAAKGGGRDIMKDIKVRLMTDSPDDSQDLMIGAIESNLFADQISWKSDQPVWLNQWPLKQEKLQALQQLVTEQLQLGHLEESNSPWNTPVFVIKKKSGKWRLLQDLRAVNATMHDMGALQPGLPSPVAVPKGWEIIIIDLQDCFFNIKLHPEDCKRFAFSVPSPNFKRPYQRFQWKVLPQGMKNSPTLCQKFVDKAILTVRDKYQDSYIVHYMDDILLAHPSRSIVDEILTSMIQALNKHGLVVSTEKIQKYDNLKYLGTHIQGDSVSYQKLQIRTDKLRTLNDFQKLLGNINWIRPFLKLTTGELKPLFEILNGDSNPISTRKLTPEACKALQLMNERLSTARVKRLDLSQPWSLCILKTEYTPTACLWQDGVVEWIHLPHISPKVITPYDIFCTQLIIKGRHRSKELFSKDPDYIVVPYTKVQFDLLLQEKEDWPISLLGFLGEVHFHLPKDPLLTFTLQTAIIFPHMTSTTPLEKGIVIFTDGSANGRSVTYIQGREPIIKENTQNTAQQAEIVAVITAFEEVSQPFNLYTDSKYVTGLFPEIETATLSPRTKIYTELKHLQRLIHKRQEKFYIGHIRGHTGLPGPLAQGNAYADSLTRILTAGKRTADGSEFEKRTADGSEFESPKKKAKVE

SEQ ID NO: 3321 - protein, 2022 aa, synthetic construct; identical to SEQ ID NO: 3215
  source 1..2022: note = Description of Artificial Sequence: Synthetic polypeptide

SEQ ID NO: 3322 - protein, 2024 aa, synthetic construct; identical to SEQ ID NO: 3232
  source 1..2024: note = Description of Artificial Sequence: Synthetic polypeptide

SEQ ID NO: 3323 - protein, 2024 aa, synthetic construct; identical to SEQ ID NO: 3235
  source 1..2024: note = Description of Artificial Sequence: Synthetic polypeptide

SEQ ID NO: 3324 - protein, 2024 aa, synthetic construct; identical to SEQ ID NO: 3236
  source 1..2024: note = Description of Artificial Sequence: Synthetic polypeptide

SEQ ID NO: 3325 - protein, 2024 aa, synthetic construct
  source 1..2024: note = Description of Artificial Sequence: Synthetic polypeptide
MPAAKRVKLDGGDKKYSIGLDIGTNSVGWAVITDEYKVPSKKFKVLGNTDRHSIKKNLIGALLFDSGETAEATRLKRTARRRYTRRKNRICYLQEIFSNEMAKVDDSFFHRLEESFLVEEDKKHERHPIFGNIVDEVAYHEKYPTIYHLRKKLVDSTDKADLRLIYLALAHMIKFRGHFLIEGDLNPDNSDVDKLFIQLVQTYNQLFEENPINASGVDAKAILSARLSKSRRLENLIAQLPGEKKNGLFGNLIALSLGLTPNFKSNFDLAEDAKLQLSKDTYDDDLDNLLAQIGDQYADLFLAAKNLSDAILLSDILRVNTEITKAPLSASMIKRYDEHHQDLTLLKALVRQQLPEKYKEIFFDQSKNGYAGYIDGGASQEEFYKFIKPILEKMDGTEELLVKLNREDLLRKQRTFDNGSIPHQIHLGELHAILRRQEDFYPFLKDNREKIEKILTFRIPYYVGPLARGNSRFAWMTRKSEETITPWNFEEVVDKGASAQSFIERMTNFDKNLPNEKVLPKHSLLYEYFTVYNELTKVKYVTEGMRKPAFLSGEQKKAIVDLLFKTNRKVTVKQLKEDYFKKIECFDSVEISGVEDRFNASLGTYHDLLKIIKDKDFLDNEENEDILEDIVLTLTLFEDREMIEERLKTYAHLFDDKVMKQLKRRRYTGWGRLSRKLINGIRDKQSGKTILDFLKSDGFANRNFMQLIHDDSLTFKEDIQKAQVSGQGDSLHEHIANLAGSPAIKKGILQTVKVVDELVKVMGRHKPENIVIEMARENQTTQKGQKNSRERMKRIEEGIKELGSQILKEHPVENTQLQNEKLYLYYLQNGRDMYVDQELDINRLSDYDVDHIVPQSFLKDDSIDNKVLTRSDKARGKSDNVPSEEVVKKMKNYWRQLLNAKLITQRKFDNLTKAERGGLSELDKAGFIKRQLVETRQITKHVAQILDSRMNTKYDENDKLIREVKVITLKSKLVSDFRKDFQFYKVREINNYHHAHDAYLNAVVGTALIKKYPKLESEFVYGDYKVYDVRKMIAKSEQEIGKATAKYFFYSNIMNFFKTEITLANGEIRKRPLIETNGETGEIVWDKGRDFATVRKVLSMPQVNIVKKTEVQTGGFSKESILPKRNSDKLIARKKDWDPKKYGGFDSPTVAYSVLVVAKVEKGKSKKLKSVKELLGITIMERSSFEKNPIDFLEAKGYKEVKKDLIIKLPKYSLFELENGRKRMLASAGELQKGNELALPSKYVNFLYLASHYEKLKGSPEDNEQKQLFVEQHKHYLDEIIEQISEFSKRVILADANLDKVLSAYNKHRDKPIREQAENIIHLFTLTNLGAPAAFKYFDTTIDRKRYTSTKEVLDATLIHQSITGLYETRIDLSQLGGDGGGGGGGSEAAAKGGGRDIMKDIKVRLMTDSPDDSQDLMIGAIESNLFADQISWKSDQPVWLNQWPLKQEKLQALQQLVTEQLQLGHLEESNSPWNTPVFVIKKKSGKWRLLQDLRAVNATMHDMGALQPGLPSPVAVPKGWEIIIIDLQDCFFNIKLHPEDCKRFAFSVPSPNFKRPYQRFQWKVLPQGMKNSPTLCQKFVDKAILTVRDKYQDSYIVHYMDDILLAHPSRSIVDEILTSMIQALNKHGLVVSTEKIQKYDNLKYLGTHIQGDSVSYQKLQIRTDKLRTLNDFQKLLGNINWIRPFLKLTTGELKPLFEILNGDSNPISTRKLTPEACKALQLMNERLSTARVKRLDLSQPWSLCILKTEYTPTACLWQDGVVEWIHLPHISPKVITPYDIFCTQLIIKGRHRSKELFSKDPDYIVVPYTKVQFDLLLQEKEDWPISLLGFLGEVHFHLPKDPLLTFTLQTAIIFPHMTSTTPLEKGIVIFTDGSANGRSVTYIQGREPIIKENTQNTAQQAEIVAVITAFEEVSQPFNLYTDSKYVTGLFPEIETATLSPRTKIYTELKHLQRLIHKRQEKFYIGHIRGHTGLPGPLAQGNAYADSLTRILTAGKRTADGSEFEKRTADGSEFESPKKKAKVE

SEQ ID NO: 3326 - protein, 2024 aa, synthetic construct
  source 1..2024: note = Description of Artificial Sequence: Synthetic polypeptide
MPAAKRVKLDGGDKKYSIGLDIGTNSVGWAVITDEYKVPSKKFKVLGNTDRHSIKKNLIGALLFDSGETAEATRLKRTARRRYTRRKNRICYLQEIFSNEMAKVDDSFFHRLEESFLVEEDKKHERHPIFGNIVDEVAYHEKYPTIYHLRKKLVDSTDKADLRLIYLALAHMIKFRGHFLIEGDLNPDNSDVDKLFIQLVQTYNQLFEENPINASGVDAKAILSARLSKSRRLENLIAQLPGEKKNGLFGNLIALSLGLTPNFKSNFDLAEDAKLQLSKDTYDDDLDNLLAQIGDQYADLFLAAKNLSDAILLSDILRVNTEITKAPLSASMIKRYDEHHQDLTLLKALVRQQLPEKYKEIFFDQSKNGYAGYIDGGASQEEFYKFIKPILEKMDGTEELLVKLNREDLLRKQRTFDNGSIPHQIHLGELHAILRRQEDFYPFLKDNREKIEKILTFRIPYYVGPLARGNSRFAWMTRKSEETITPWNFEEVVDKGASAQSFIERMTNFDKNLPNEKVLPKHSLLYEYFTVYNELTKVKYVTEGMRKPAFLSGEQKKAIVDLLFKTNRKVTVKQLKEDYFKKIECFDSVEISGVEDRFNASLGTYHDLLKIIKDKDFLDNEENEDILEDIVLTLTLFEDREMIEERLKTYAHLFDDKVMKQLKRRRYTGWGRLSRKLINGIRDKQSGKTILDFLKSDGFANRNFMQLIHDDSLTFKEDIQKAQVSGQGDSLHEHIANLAGSPAIKKGILQTVKVVDELVKVMGRHKPENIVIEMARENQTTQKGQKNSRERMKRIEEGIKELGSQILKEHPVENTQLQNEKLYLYYLQNGRDMYVDQELDINRLSDYDVDHIVPQSFLKDDSIDNKVLTRSDKARGKSDNVPSEEVVKKMKNYWRQLLNAKLITQRKFDNLTKAERGGLSELDKAGFIKRQLVETRQITKHVAQILDSRMNTKYDENDKLIREVKVITLKSKLVSDFRKDFQFYKVREINNYHHAHDAYLNAVVGTALIKKYPKLESEFVYGDYKVYDVRKMIAKSEQEIGKATAKYFFYSNIMNFFKTEITLANGEIRKRPLIETNGETGEIVWDKGRDFATVRKVLSMPQVNIVKKTEVQTGGFSKESILPKRNSDKLIARKKDWDPKKYGGFDSPTVAYSVLVVAKVEKGKSKKLKSVKELLGITIMERSSFEKNPIDFLEAKGYKEVKKDLIIKLPKYSLFELENGRKRMLASAGELQKGNELALPSKYVNFLYLASHYEKLKGSPEDNEQKQLFVEQHKHYLDEIIEQISEFSKRVILADANLDKVLSAYNKHRDKPIREQAENIIHLFTLTNLGAPAAFKYFDTTIDRKRYTSTKEVLDATLIHQSITGLYETRIDLSQLGGDGGGGSEAAAKGSSGGGRDIMKDIKVRLMTDSPDDSQDLMIGAIESNLFADQISWKSDQPVWLNQWPLKQEKLQALQQLVTEQLQLGHLEESNSPWNTPVFVIKKKSGKWRLLQDLRAVNATMHDMGALQPGLPSPVAVPKGWEIIIIDLQDCFFNIKLHPEDCKRFAFSVPSPNFKRPYQRFQWKVLPQGMKNSPTLCQKFVDKAILTVRDKYQDSYIVHYMDDILLAHPSRSIVDEILTSMIQALNKHGLVVSTEKIQKYDNLKYLGTHIQGDSVSYQKLQIRTDKLRTLNDFQKLLGNINWIRPFLKLTTGELKPLFEILNGDSNPISTRKLTPEACKALQLMNERLSTARVKRLDLSQPWSLCILKTEYTPTACLWQDGVVEWIHLPHISPKVITPYDIFCTQLIIKGRHRSKELFSKDPDYIVVPYTKVQFDLLLQEKEDWPISLLGFLGEVHFHLPKDPLLTFTLQTAIIFPHMTSTTPLEKGIVIFTDGSANGRSVTYIQGREPIIKENTQNTAQQAEIVAVITAFEEVSQPFNLYTDSKYVTGLFPEIETATLSPRTKIYTELKHLQRLIHKRQEKFYIGHIRGHTGLPGPLAQGNAYADSLTRILTAGKRTADGSEFEKRTADGSEFESPKKKAKVE

SEQ ID NO: 3327 - protein, 2018 aa, synthetic construct
  source 1..2018: note = Description of Artificial Sequence: Synthetic polypeptide
MPAAKRVKLDGGDKKYSIGLDIGTNSVGWAVITDEYKVPSKKFKVLGNTDRHSIKKNLIGALLFDSGETAEATRLKRTARRRYTRRKNRICYLQEIFSNEMAKVDDSFFHRLEESFLVEEDKKHERHPIFGNIVDEVAYHEKYPTIYHLRKKLVDSTDKADLRLIYLALAHMIKFRGHFLIEGDLNPDNSDVDKLFIQLVQTYNQLFEENPINASGVDAKAILSARLSKSRRLENLIAQLPGEKKNGLFGNLIALSLGLTPNFKSNFDLAEDAKLQLSKDTYDDDLDNLLAQIGDQYADLFLAAKNLSDAILLSDILRVNTEITKAPLSASMIKRYDEHHQDLTLLKALVRQQLPEKYKEIFFDQSKNGYAGYIDGGASQEEFYKFIKPILEKMDGTEELLVKLNREDLLRKQRTFDNGSIPHQIHLGELHAILRRQEDFYPFLKDNREKIEKILTFRIPYYVGPLARGNSRFAWMTRKSEETITPWNFEEVVDKGASAQSFIERMTNFDKNLPNEKVLPKHSLLYEYFTVYNELTKVKYVTEGMRKPAFLSGEQKKAIVDLLFKTNRKVTVKQLKEDYFKKIECFDSVEISGVEDRFNASLGTYHDLLKIIKDKDFLDNEENEDILEDIVLTLTLFEDREMIEERLKTYAHLFDDKVMKQLKRRRYTGWGRLSRKLINGIRDKQSGKTILDFLKSDGFANRNFMQLIHDDSLTFKEDIQKAQVSGQGDSLHEHIANLAGSPAIKKGILQTVKVVDELVKVMGRHKPENIVIEMARENQTTQKGQKNSRERMKRIEEGIKELGSQILKEHPVENTQLQNEKLYLYYLQNGRDMYVDQELDINRLSDYDVDHIVPQSFLKDDSIDNKVLTRSDKARGKSDNVPSEEVVKKMKNYWRQLLNAKLITQRKFDNLTKAERGGLSELDKAGFIKRQLVETRQITKHVAQILDSRMNTKYDENDKLIREVKVITLKSKLVSDFRKDFQFYKVREINNYHHAHDAYLNAVVGTALIKKYPKLESEFVYGDYKVYDVRKMIAKSEQEIGKATAKYFFYSNIMNFFKTEITLANGEIRKRPLIETNGETGEIVWDKGRDFATVRKVLSMPQVNIVKKTEVQTGGFSKESILPKRNSDKLIARKKDWDPKKYGGFDSPTVAYSVLVVAKVEKGKSKKLKSVKELLGITIMERSSFEKNPIDFLEAKGYKEVKKDLIIKLPKYSLFELENGRKRMLASAGELQKGNELALPSKYVNFLYLASHYEKLKGSPEDNEQKQLFVEQHKHYLDEIIEQISEFSKRVILADANLDKVLSAYNKHRDKPIREQAENIIHLFTLTNLGAPAAFKYFDTTIDRKRYTSTKEVLDATLIHQSITGLYETRIDLSQLGGDGGPAPAPGGGRDIMKDIKVRLMTDSPDDSQDLMIGAIESNLFADQISWKSDQPVWLNQWPLKQEKLQALQQLVTEQLQLGHLEESNSPWNTPVFVIKKKSGKWRLLQDLRAVNATMHDMGALQPGLPSPVAVPKGWEIIIIDLQDCFFNIKLHPEDCKRFAFSVPSPNFKRPYQRFQWKVLPQGMKNSPTLCQKFVDKAILTVRDKYQDSYIVHYMDDILLAHPSRSIVDEILTSMIQALNKHGLVVSTEKIQKYDNLKYLGTHIQGDSVSYQKLQIRTDKLRTLNDFQKLLGNINWIRPFLKLTTGELKPLFEILNPDSNPISTRKLTPEACKALQLMNERLSTARVKRLDLSQPWSLCILKTEYTPTACLWQDGVVEWIHLPHISPKVITPYDIFCTQLIIKGRHRSKELFSKDPDYIVVPYTKVQFDLLLQEKEDWPISLLGFLGEVHFHLPKDPLLTFTLQTAIIFPHMTSTTPLEKGIVIFTDGSANGRSVTYIQGREPIIKENTQNTAQQAEIVAVITAFEEVSQPFNLYTDSKYVTGLFPEIETATLSPRTKIYTELKHLQRLIHKRQEKFYIGHIRGHTGLPGPLAQGNAYADSLTRILTAGKRTADGSEFEKRTADGSEFESPKKKAKVE

SEQ ID NO: 3328 - protein, 2028 aa, synthetic construct
  source 1..2028: note = Description of Artificial Sequence: Synthetic polypeptide
MPAAKRVKLDGGDKKYSIGLDIGTNSVGWAVITDEYKVPSKKFKVLGNTDRHSIKKNLIGALLFDSGETAEATRLKRTARRRYTRRKNRICYLQEIFSNEMAKVDDSFFHRLEESFLVEEDKKHERHPIFGNIVDEVAYHEKYPTIYHLRKKLVDSTDKADLRLIYLALAHMIKFRGHFLIEGDLNPDNSDVDKLFIQLVQTYNQLFEENPINASGVDAKAILSARLSKSRRLENLIAQLPGEKKNGLFGNLIALSLGLTPNFKSNFDLAEDAKLQLSKDTYDDDLDNLLAQIGDQYADLFLAAKNLSDAILLSDILRVNTEITKAPLSASMIKRYDEHHQDLTLLKALVRQQLPEKYKEIFFDQSKNGYAGYIDGGASQEEFYKFIKPILEKMDGTEELLVKLNREDLLRKQRTFDNGSIPHQIHLGELHAILRRQEDFYPFLKDNREKIEKILTFRIPYYVGPLARGNSRFAWMTRKSEETITPWNFEEVVDKGASAQSFIERMTNFDKNLPNEKVLPKHSLLYEYFTVYNELTKVKYVTEGMRKPAFLSGEQKKAIVDLLFKTNRKVTVKQLKEDYFKKIECFDSVEISGVEDRFNASLGTYHDLLKIIKDKDFLDNEENEDILEDIVLTLTLFEDREMIEERLKTYAHLFDDKVMKQLKRRRYTGWGRLSRKLINGIRDKQSGKTILDFLKSDGFANRNFMQLIHDDSLTFKEDIQKAQVSGQGDSLHEHIANLAGSPAIKKGILQTVKVVDELVKVMGRHKPENIVIEMARENQTTQKGQKNSRERMKRIEEGIKELGSQILKEHPVENTQLQNEKLYLYYLQNGRDMYVDQELDINRLSDYDVDHIVPQSFLKDDSIDNKVLTRSDKARGKSDNVPSEEVVKKMKNYWRQLLNAKLITQRKFDNLTKAERGGLSELDKAGFIKRQLVETRQITKHVAQILDSRMNTKYDENDKLIREVKVITLKSKLVSDFRKDFQFYKVREINNYHHAHDAYLNAVVGTALIKKYPKLESEFVYGDYKVYDVRKMIAKSEQEIGKATAKYFFYSNIMNFFKTEITLANGEIRKRPLIETNGETGEIVWDKGRDFATVRKVLSMPQVNIVKKTEVQTGGFSKESILPKRNSDKLIARKKDWDPKKYGGFDSPTVAYSVLVVAKVEKGKSKKLKSVKELLGITIMERSSFEKNPIDFLEAKGYKEVKKDLIIKLPKYSLFELENGRKRMLASAGELQKGNELALPSKYVNFLYLASHYEKLKGSPEDNEQKQLFVEQHKHYLDEIIEQISEFSKRVILADANLDKVLSAYNKHRDKPIREQAENIIHLFTLTNLGAPAAFKYFDTTIDRKRYTSTKEVLDATLIHQSITGLYETRIDLSQLGGDGGGGGGSEAAAKGGGGSGGGRDIMKDIKVRLMTDSPDDSQDLMIGAIESNLFADQISWKSDQPVWLNQWPLKQEKLQALQQLVTEQLQLGHLEESNSPWNTPVFVIKKKSGKWRLLQDLRAVNATMHDMGALQPGLPSPVAVPKGWEIIIIDLQDCFFNIKLHPEDCKRFAFSVPSPNFKRPYQRFQWKVLPQGMKNSPTLCQKFVDKAILTVRDKYQDSYIVHYMDDILLAHPSRSIVDEILTSMIQALNKHGLVVSTEKIQKYDNLKYLGTHIQGDSVSYQKLQIRTDKLRTLNDFQKLLGNINWIRPFLKLTTGELKPLFEILNPDSNPISTRKLTPEACKALQLMNERLSTARVKRLDLSQPWSLCILKTEYTPTACLWQDGVVEWIHLPHISPKVITPYDIFCTQLIIKGRHRSKELFSKDPDYIVVPYTKVQFDLLLQEKEDWPISLLGFLGEVHFHLPKDPLLTFTLQTAIIFPHMTSTTPLEKGIVIFTDGSANGRSVTYIQGREPIIKENTQNTAQQAEIVAVITAFEEVSQPFNLYTDSKYVTGLFPEIETATLSPRTKIYTELKHLQRLIHKRQEKFYIGHIRGHTGLPGPLAQGNAYADSLTRILTAGKRTADGSEFEKRTADGSEFESPKKKAKVE

SEQ ID NO: 3329 - protein, 2022 aa, synthetic construct
  source 1..2022: note = Description of Artificial Sequence: Synthetic polypeptide
MPAAKRVKLDGGDKKYSIGLDIGTNSVGWAVITDEYKVPSKKFKVLGNTDRHSIKKNLIGALLFDSGETAEATRLKRTARRRYTRRKNRICYLQEIFSNEMAKVDDSFFHRLEESFLVEEDKKHERHPIFGNIVDEVAYHEKYPTIYHLRKKLVDSTDKADLRLIYLALAHMIKFRGHFLIEGDLNPDNSDVDKLFIQLVQTYNQLFEENPINASGVDAKAILSARLSKSRRLENLIAQLPGEKKNGLFGNLIALSLGLTPNFKSNFDLAEDAKLQLSKDTYDDDLDNLLAQIGDQYADLFLAAKNLSDAILLSDILRVNTEITKAPLSASMIKRYDEHHQDLTLLKALVRQQLPEKYKEIFFDQSKNGYAGYIDGGASQEEFYKFIKPILEKMDGTEELLVKLNREDLLRKQRTFDNGSIPHQIHLGELHAILRRQEDFYPFLKDNREKIEKILTFRIPYYVGPLARGNSRFAWMTRKSEETITPWNFEEVVDKGASAQSFIERMTNFDKNLPNEKVLPKHSLLYEYFTVYNELTKVKYVTEGMRKPAFLSGEQKKAIVDLLFKTNRKVTVKQLKEDYFKKIECFDSVEISGVEDRFNASLGTYHDLLKIIKDKDFLDNEENEDILEDIVLTLTLFEDREMIEERLKTYAHLFDDKVMKQLKRRRYTGWGRLSRKLINGIRDKQSGKTILDFLKSDGFANRNFMQLIHDDSLTFKEDIQKAQVSGQGDSLHEHIANLAGSPAIKKGILQTVKVVDELVKVMGRHKPENIVIEMARENQTTQKGQKNSRERMKRIEEGIKELGSQILKEHPVENTQLQNEKLYLYYLQNGRDMYVDQELDINRLSDYDVDHIVPQSFLKDDSIDNKVLTRSDKARGKSDNVPSEEVVKKMKNYWRQLLNAKLITQRKFDNLTKAERGGLSELDKAGFIKRQLVETRQITKHVAQILDSRMNTKYDENDKLIREVKVITLKSKLVSDFRKDFQFYKVREINNYHHAHDAYLNAVVGTALIKKYPKLESEFVYGDYKVYDVRKMIAKSEQEIGKATAKYFFYSNIMNFFKTEITLANGEIRKRPLIETNGETGEIVWDKGRDFATVRKVLSMPQVNIVKKTEVQTGGFSKESILPKRNSDKLIARKKDWDPKKYGGFDSPTVAYSVLVVAKVEKGKSKKLKSVKELLGITIMERSSFEKNPIDFLEAKGYKEVKKDLIIKLPKYSLFELENGRKRMLASAGELQKGNELALPSKYVNFLYLASHYEKLKGSPEDNEQKQLFVEQHKHYLDEIIEQISEFSKRVILADANLDKVLSAYNKHRDKPIREQAENIIHLFTLTNLGAPAAFKYFDTTIDRKRYTSTKEVLDATLIHQSITGLYETRIDLSQLGGDGGGGSGGGGSSGGGRDIMKDIKVRLMTDSPDDSQDLMIGAIESNLFADQISWKSDQPVWLNQWPLKQEKLQALQQLVTEQLQLGHLEESNSPWNTPVFVIKKKSGKWRLLQDLRAVNATMHDMGALQPGLPSPVAVPKGWEIIIIDLQDCFFNIKLHPEDCKRFAFSVPSPNFKRPYQRFQWKVLPQGMKNSPTLCQKFVDKAILTVRDKYQDSYIVHYMDDILLAHPSRSIVDEILTSMIQALNKHGLVVSTEKIQKYDNLKYLGTHIQGDSVSYQKLQIRTDKLRTLNDFQKLLGNINWIRPFLKLTTGELKPLFEILNPDSNPISTRKLTPEACKALQLMNERLSTARVKRLDLSQPWSLCILKTEYTPTACLWQDGVVEWIHLPHISPKVITPYDIFCTQLIIKGRHRSKELFSKDPDYIVVPYTKVQFDLLLQEKEDWPISLLGFLGEVHFHLPKDPLLTFTLQTAIIFPHMTSTTPLEKGIVIFTDGSANGRSVTYIQGREPIIKENTQNTAQQAEIVAVITAFEEVSQPFNLYTDSKYVTGLFPEIETATLSPRTKIYTELKHLQRLIHKRQEKFYIGHIRGHTGLPGPLAQGNAYADSLTRILTAGKRTADGSEFEKRTADGSEFESPKKKAKVE

SEQ ID NO: 3330 - protein, 2033 aa, synthetic construct
  source 1..2033: note = Description of Artificial Sequence: Synthetic polypeptide
MPAAKRVKLDGGDKKYSIGLDIGTNSVGWAVITDEYKVPSKKFKVLGNTDRHSIKKNLIGALLFDSGETAEATRLKRTARRRYTRRKNRICYLQEIFSNEMAKVDDSFFHRLEESFLVEEDKKHERHPIFGNIVDEVAYHEKYPTIYHLRKKLVDSTDKADLRLIYLALAHMIKFRGHFLIEGDLNPDNSDVDKLFIQLVQTYNQLFEENPINASGVDAKAILSARLSKSRRLENLIAQLPGEKKNGLFGNLIALSLGLTPNFKSNFDLAEDAKLQLSKDTYDDDLDNLLAQIGDQYADLFLAAKNLSDAILLSDILRVNTEITKAPLSASMIKRYDEHHQDLTLLKALVRQQLPEKYKEIFFDQSKNGYAGYIDGGASQEEFYKFIKPILEKMDGTEELLVKLNREDLLRKQRTFDNGSIPHQIHLGELHAILRRQEDFYPFLKDNREKIEKILTFRIPYYVGPLARGNSRFAWMTRKSEETITPWNFEEVVDKGASAQSFIERMTNFDKNLPNEKVLPKHSLLYEYFTVYNELTKVKYVTEGMRKPAFLSGEQKKAIVDLLFKTNRKVTVKQLKEDYFKKIECFDSVEISGVEDRFNASLGTYHDLLKIIKDKDFLDNEENEDILEDIVLTLTLFEDREMIEERLKTYAHLFDDKVMKQLKRRRYTGWGRLSRKLINGIRDKQSGKTILDFLKSDGFANRNFMQLIHDDSLTFKEDIQKAQVSGQGDSLHEHIANLAGSPAIKKGILQTVKVVDELVKVMGRHKPENIVIEMARENQTTQKGQKNSRERMKRIEEGIKELGSQILKEHPVENTQLQNEKLYLYYLQNGRDMYVDQELDINRLSDYDVDHIVPQSFLKDDSIDNKVLTRSDKARGKSDNVPSEEVVKKMKNYWRQLLNAKLITQRKFDNLTKAERGGLSELDKAGFIKRQLVETRQITKHVAQILDSRMNTKYDENDKLIREVKVITLKSKLVSDFRKDFQFYKVREINNYHHAHDAYLNAVVGTALIKKYPKLESEFVYGDYKVYDVRKMIAKSEQEIGKATAKYFFYSNIMNFFKTEITLANGEIRKRPLIETNGETGEIVWDKGRDFATVRKVLSMPQVNIVKKTEVQTGGFSKESILPKRNSDKLIARKKDWDPKKYGGFDSPTVAYSVLVVAKVEKGKSKKLKSVKELLGITIMERSSFEKNPIDFLEAKGYKEVKKDLIIKLPKYSLFELENGRKRMLASAGELQKGNELALPSKYVNFLYLASHYEKLKGSPEDNEQKQLFVEQHKHYLDEIIEQISEFSKRVILADANLDKVLSAYNKHRDKPIREQAENIIHLFTLTNLGAPAAFKYFDTTIDRKRYTSTKEVLDATLIHQSITGLYETRIDLSQLGGDGGEAAAKEAAAKEAAAKEAAAKGGGRDIMKDIKVRLMTDSPDDSQDLMIGAIESNLFADQISWKSDQPVWLNQWPLKQEKLQALQQLVTEQLQLGHLEESNSPWNTPVFVIKKKSGKWRLLQDLRAVNATMHDMGALQPGLPSPVAPPKGWEIIIIDLQDCFFNIKLHPEDCKRFAFSVPSPNFKRPYQRFQWKVLPQGMKNSPTLCQKFVDKAILTVRDKYQDSYIVHYMDDILLAHPSRSIVDEILTSMIQALNKHGLVVSTEKIQKYDNLKYLGTHIQGDSVSYQKLQIRTDKLRTLNDFQKLLGNINWIRPFLKLTTGELKPLFEILNPDSNPISTRKLTPEACKALQLMNERLSTARVKRLDLSQPWSLCILKTEYTPTACLWQDGVVEWIHLPHISPKVITPYDIFCTQLIIKGRHRSKELFSKDPDYIVVPYTKVQFDLLLQEKEDWPISLLGFLGEVHFHLPKDPLLTFTLQTAIIFPHMTSTTPLEKGIVIFTDGSANGRSVTYIQGREPIIKENTQNTAQQAEIVAVITAFEEVSQPFNLYTDSKYVTGLFPEIETATLSPRTKIYTELKHLQRLIHKRQEKFYIGHIRGHTGLPGPLAQGNAYADSLTRILTAGKRTADGSEFEKRTADGSEFESPKKKAKVE

SEQ ID NO: 3331 - protein, 2022 aa, synthetic construct
  source 1..2022: note = Description of Artificial Sequence: Synthetic polypeptide
MPAAKRVKLDGGDKKYSIGLDIGTNSVGWAVITDEYKVPSKKFKVLGNTDRHSIKKNLIGALLFDSGETAEATRLKRTARRRYTRRKNRICYLQEIFSNEMAKVDDSFFHRLEESFLVEEDKKHERHPIFGNIVDEVAYHEKYPTIYHLRKKLVDSTDKADLRLIYLALAHMIKFRGHFLIEGDLNPDNSDVDKLFIQLVQTYNQLFEENPINASGVDAKAILSARLSKSRRLENLIAQLPGEKKNGLFGNLIALSLGLTPNFKSNFDLAEDAKLQLSKDTYDDDLDNLLAQIGDQYADLFLAAKNLSDAILLSDILRVNTEITKAPLSASMIKRYDEHHQDLTLLKALVRQQLPEKYKEIFFDQSKNGYAGYIDGGASQEEFYKFIKPILEKMDGTEELLVKLNREDLLRKQRTFDNGSIPHQIHLGELHAILRRQEDFYPFLKDNREKIEKILTFRIPYYVGPLARGNSRFAWMTRKSEETITPWNFEEVVDKGASAQSFIERMTNFDKNLPNEKVLPKHSLLYEYFTVYNELTKVKYVTEGMRKPAFLSGEQKKAIVDLLFKTNRKVTVKQLKEDYFKKIECFDSVEISGVEDRFNASLGTYHDLLKIIKDKDFLDNEENEDILEDIVLTLTLFEDREMIEERLKTYAHLFDDKVMKQLKRRRYTGWGRLSRKLINGIRDKQSGKTILDFLKSDGFANRNFMQLIHDDSLTFKEDIQKAQVSGQGDSLHEHIANLAGSPAIKKGILQTVKVVDELVKVMGRHKPENIVIEMARENQTTQKGQKNSRERMKRIEEGIKELGSQILKEHPVENTQLQNEKLYLYYLQNGRDMYVDQELDINRLSDYDVDHIVPQSFLKDDSIDNKVLTRSDKARGKSDNVPSEEVVKKMKNYWRQLLNAKLITQRKFDNLTKAERGGLSELDKAGFIKRQLVETRQITKHVAQILDSRMNTKYDENDKLIREVKVITLKSKLVSDFRKDFQFYKVREINNYHHAHDAYLNAVVGTALIKKYPKLESEFVYGDYKVYDVRKMIAKSEQEIGKATAKYFFYSNIMNFFKTEITLANGEIRKRPLIETNGETGEIVWDKGRDFATVRKVLSMPQVNIVKKTEVQTGGFSKESILPKRNSDKLIARKKDWDPKKYGGFDSPTVAYSVLVVAKVEKGKSKKLKSVKELLGITIMERSSFEKNPIDFLEAKGYKEVKKDLIIKLPKYSLFELENGRKRMLASAGELQKGNELALPSKYVNFLYLASHYEKLKGSPEDNEQKQLFVEQHKHYLDEIIEQISEFSKRVILADANLDKVLSAYNKHRDKPIREQAENIIHLFTLTNLGAPAAFKYFDTTIDRKRYTSTKEVLDATLIHQSITGLYETRIDLSQLGGDGGGGGGGSPAPGGGRDIMKDIKVRLMTDSPDDSQDLMIGAIESNLFADQISWKSDQPVWLNQWPLKQEKLQALQQLVTEQLQLGHLEESNSPWNTPVFVIKKKSGKWRLLQDLRAVNATMHDMGALQPGLPSPVAPPKGWEIIIIDLQDCFFNIKLHPEDCKRFAFSVPSPNFKRPYQRFQWKVLPQGMKNSPTLCQKFVDKAILTVRDKYQDSYIVHYMDDILLAHPSRSIVDEILTSMIQALNKHGLVVSTEKIQKYDNLKYLGTHIQGDSVSYQKLQIRTDKLRTLNDFQKLLGNINWIRPFLKLTTGELKPLFEILNPDSNPISTRKLTPEACKALQLMNERLSTARVKRLDLSQPWSLCILKTEYTPTACLWQDGVVEWIHLPHISPKVITPYDIFCTQLIIKGRHRSKELFSKDPDYIVVPYTKVQFDLLLQEKEDWPISLLGFLGEVHFHLPKDPLLTFTLQTAIIFPHMTSTTPLEKGIVIFTDGSANGRSVTYIQGREPIIKENTQNTAQQAEIVAVITAFEEVSQPFNLYTDSKYVTGLFPEIETATLSPRTKIYTELKHLQRLIHKRQEKFYIGHIRGHTGLPGPLAQGNAYADSLTRILTAGKRTADGSEFEKRTADGSEFESPKKKAKVE

SEQ ID NO: 3332 - protein, 2024 aa, synthetic construct
  source 1..2024: note = Description of Artificial Sequence: Synthetic polypeptide
MPAAKRVKLDGGDKKYSIGLDIGTNSVGWAVITDEYKVPSKKFKVLGNTDRHSIKKNLIGALLFDSGETAEATRLKRTARRRYTRRKNRICYLQEIFSNEMAKVDDSFFHRLEESFLVEEDKKHERHPIFGNIVDEVAYHEKYPTIYHLRKKLVDSTDKADLRLIYLALAHMIKFRGHFLIEGDLNPDNSDVDKLFIQLVQTYNQLFEENPINASGVDAKAILSARLSKSRRLENLIAQLPGEKKNGLFGNLIALSLGLTPNFKSNFDLAEDAKLQLSKDTYDDDLDNLLAQIGDQYADLFLAAKNLSDAILLSDILRVNTEITKAPLSASMIKRYDEHHQDLTLLKALVRQQLPEKYKEIFFDQSKNGYAGYIDGGASQEEFYKFIKPILEKMDGTEELLVKLNREDLLRKQRTFDNGSIPHQIHLGELHAILRRQEDFYPFLKDNREKIEKILTFRIPYYVGPLARGNSRFAWMTRKSEETITPWNFEEVVDKGASAQSFIERMTNFDKNLPNEKVLPKHSLLYEYFTVYNELTKVKYVTEGMRKPAFLSGEQKKAIVDLLFKTNRKVTVKQLKEDYFKKIECFDSVEISGVEDRFNASLGTYHDLLKIIKDKDFLDNEENEDILEDIVLTLTLFEDREMIEERLKTYAHLFDDKVMKQLKRRRYTGWGRLSRKLINGIRDKQSGKTILDFLKSDGFANRNFMQLIHDDSLTFKEDIQKAQVSGQGDSLHEHIANLAGSPAIKKGILQTVKVVDELVKVMGRHKPENIVIEMARENQTTQKGQKNSRERMKRIEEGIKELGSQILKEHPVENTQLQNEKLYLYYLQNGRDMYVDQELDINRLSDYDVDHIVPQSFLKDDSIDNKVLTRSDKARGKSDNVPSEEVVKKMKNYWRQLLNAKLITQRKFDNLTKAERGGLSELDKAGFIKRQLVETRQITKHVAQILDSRMNTKYDENDKLIREVKVITLKSKLVSDFRKDFQFYKVREINNYHHAHDAYLNAVVGTALIKKYPKLESEFVYGDYKVYDVRKMIAKSEQEIGKATAKYFFYSNIMNFFKTEITLANGEIRKRPLIETNGETGEIVWDKGRDFATVRKVLSMPQVNIVKKTEVQTGGFSKESILPKRNSDKLIARKKDWDPKKYGGFDSPTVAYSVLVVAKVEKGKSKKLKSVKELLGITIMERSSFEKNPIDFLEAKGYKEVKKDLIIKLPKYSLFELENGRKRMLASAGELQKGNELALPSKYVNFLYLASHYEKLKGSPEDNEQKQLFVEQHKHYLDEIIEQISEFSKRVILADANLDKVLSAYNKHRDKPIREQAENIIHLFTLTNLGAPAAFKYFDTTIDRKRYTSTKEVLDATLIHQSITGLYETRIDLSQLGGDGGGSSEAAAKPAPGGGRDIMKDIKVRLMTDSPDDSQDLMIGAIESNLFADQISWKSDQPVWLNQWPLKQEKLQALQQLVTEQLQLGHLEESNSPWNTPVFVIKKKSGKWRLLQDLRAVNATMHDMGALQPGLPSPVAPPKGWEIIIIDLQDCFFNIKLHPEDCKRFAFSVPSPNFKRPYQRFQWKVLPQGMKNSPTLCQKFVDKAILTVRDKYQDSYIVHYMDDILLAHPSRSIVDEILTSMIQALNKHGLVVSTEKIQKYDNLKYLGTHIQGDSVSYQKLQIRTDKLRTLNDFQKLLGNINWIRPFLKLTTGELKPLFEILNPDSNPISTRKLTPEACKALQLMNERLSTARVKRLDLSQPWSLCILKTEYTPTACLWQDGVVEWIHLPHISPKVITPYDIFCTQLIIKGRHRSKELFSKDPDYIVVPYTKVQFDLLLQEKEDWPISLLGFLGEVHFHLPKDPLLTFTLQTAIIFPHMTSTTPLEKGIVIFTDGSANGRSVTYIQGREPIIKENTQNTAQQAEIVAVITAFEEVSQPFNLYTDSKYVTGLFPEIETATLSPRTKIYTELKHLQRLIHKRQEKFYIGHIRGHTGLPGPLAQGNAYADSLTRILTAGKRTADGSEFEKRTADGSEFESPKKKAKVE

SEQ ID NO: 3333-3999 - skipped (667 entries)

SEQ ID NO: 4000 - protein, 1381 aa, synthetic construct
MPAAKRVKLDGGDKKYSIGLDIGTNSVGWAVITDEYKVPSKKFKVLGNTDRHSIKKNLIGALLFDSGETAEATRLKRTARRRYTRRKNRICYLQEIFSNEMAKVDDSFFHRLEESFLVEEDKKHERHPIFGNIVDEVAYHEKYPTIYHLRKKLVDSTDKADLRLIYLALAHMIKFRGHFLIEGDLNPDNSDVDKLFIQLVQTYNQLFEENPINASGVDAKAILSARLSKSRRLENLIAQLPGEKKNGLFGNLIALSLGLTPNFKSNFDLAEDAKLQLSKDTYDDDLDNLLAQIGDQYADLFLAAKNLSDAILLSDILRVNTEITKAPLSASMIKRYDEHHQDLTLLKALVRQQLPEKYKEIFFDQSKNGYAGYIDGGASQEEFYKFIKPILEKMDGTEELLVKLNREDLLRKQRTFDNGSIPHQIHLGELHAILRRQEDFYPFLKDNREKIEKILTFRIPYYVGPLARGNSRFAWMTRKSEETITPWNFEEVVDKGASAQSFIERMTNFDKNLPNEKVLPKHSLLYEYFTVYNELTKVKYVTEGMRKPAFLSGEQKKAIVDLLFKTNRKVTVKQLKEDYFKKIECFDSVEISGVEDRFNASLGTYHDLLKIIKDKDFLDNEENEDILEDIVLTLTLFEDREMIEERLKTYAHLFDDKVMKQLKRRRYTGWGRLSRKLINGIRDKQSGKTILDFLKSDGFANRNFMQLIHDDSLTFKEDIQKAQVSGQGDSLHEHIANLAGSPAIKKGILQTVKVVDELVKVMGRHKPENIVIEMARENQTTQKGQKNSRERMKRIEEGIKELGSQILKEHPVENTQLQNEKLYLYYLQNGRDMYVDQELDINRLSDYDVDHIVPQSFLKDDSIDNKVLTRSDKARGKSDNVPSEEVVKKMKNYWRQLLNAKLITQRKFDNLTKAERGGLSELDKAGFIKRQLVETRQITKHVAQILDSRMNTKYDENDKLIREVKVITLKSKLVSDFRKDFQFYKVREINNYHHAHDAYLNAVVGTALIKKYPKLESEFVYGDYKVYDVRKMIAKSEQEIGKATAKYFFYSNIMNFFKTEITLANGEIRKRPLIETNGETGEIVWDKGRDFATVRKVLSMPQVNIVKKTEVQTGGFSKESILPKRNSDKLIARKKDWDPKKYGGFDSPTVAYSVLVVAKVEKGKSKKLKSVKELLGITIMERSSFEKNPIDFLEAKGYKEVKKDLIIKLPKYSLFELENGRKRMLASAGELQKGNELALPSKYVNFLYLASHYEKLKGSPEDNEQKQLFVEQHKHYLDEIIEQISEFSKRVILADANLDKVLSAYNKHRDKPIREQAENIIHLFTLTNLGAPAAFKYFDTTIDRKRYTSTKEVLDATLIHQSITGLYETRIDLSQLGGDGG

SEQ ID NO: 4001 - protein, 31 aa, synthetic construct
AGKRTADGSEFEKRTADGSEFESPKKKAKVE

SEQ ID NO: 4002-4005 - skipped (4 entries)

SEQ ID NO: 4006 - protein, 33 aa, synthetic construct
SGGSSGGSSGSETPGTSESATPESSGGSSGGSS

SEQ ID NO: 4007 - protein, 1369 aa, unidentified
SMDKKYSIGLAIGTNSVGWAVITDDYKVPSKKFKVLGNTDRHSIKKNLIGALLFDSGETAEATRLKRTARRRYTRRKNRICYLQEIFSNEMAKVDDSFFHRLEESFLVEEDKKHERHPIFGNIVDEVAYHEKYPTIYHLRKKLVDSTDKADLRLIYLALAHMIKFRGHFLIEGDLNPDNSDVDKLFIQLVQTYNQLFEENPINASGVDAKAILSARLSKSRRLENLIAQLPGEKKNGLFGNLIALSLGLTPNFKSNFDLAEDAKLQLSKDTYDDDLDNLLAQIGDQYADLFLAAKNLSDAILLSDILRVNTEITKAPLSASMIKRYDEHHQDLTLLKALVRQQLPEKYKEIFFDQSKNGYAGYIDGGASQEEFYKFIKPILEKMDGTEELLVKLNREDLLRKQRTFDNGSIPHQIHLGELHAILRRQEDFYPFLKDNREKIEKILTFRIPYYVGPLARGNSRFAWMTRKSEETITPWNFEEVVDKGASAQSFIERMTNFDKNLPNEKVLPKHSLLYEYFTVYNELTKVKYVTEGMRKPAFLSGEQKKAIVDLLFKTNRKVTVKQLKEDYFKKIECFDSVEISGVEDRFNASLGTYHDLLKIIKDKDFLDNEENEDILEDIVLTLTLFEDREMIEERLKTYAHLFDDKVMKQLKRRRYTGWGRLSRKLINGIRDKQSGKTILDFLKSDGFANRNFMQLIHDDSLTFKEDIQKAQVSGQGDSLHEHIANLAGSPAIKKGILQTVKVVDELVKVMGRHKPENIVIEMARENQTTQKGQKNSRERMKRIEEGIKELGSQILKEHPVENTQLQNEKLYLYYLQNGRDMYVDQELDINRLSDYDVDAIVPQSFLKDDSIDNKVLTRSDKNRGKSDNVPSEEVVKKMKNYWRQLLNAKLITQRKFDNLTKAERGGLSELDKAGFIKRQLVETRQITKHVAQILDSRMNTKYDENDKLIREVKVITLKSKLVSDFRKDFQFYKVREINNYHHAHDAYLNAVVGTALIKKYPKLESEFVYGDYKVYDVRKMIAKSEQEIGKATAKYFFYSNIMNFFKTEITLANGEIRKRPLIETNGETGEIVWDKGRDFATVRKVLSMPQVNIVKKTEVQTGGFSKESILPKRNSDKLIARKKDWDPKKYGGFDSPTVAYSVLVVAKVEKGKSKKLKSVKELLGITIMERSSFEKNPIDFLEAKGYKEVKKDLIIKLPKYSLFELENGRKRMLASAGELQKGNELALPSKYVNFLYLASHYEKLKGSPEDNEQKQLFVEQHKHYLDEIIEQISEFSKRVILADANLDKVLSAYNKHRDKPIREQAENIIHLFTLTNLGAPAAFKYFDTTIDRKRYTSTKEVLDATLIHQSITGLYETRIDLSQLGGD

SEQ ID NO: 4008 - protein, 76 aa, synthetic construct
GTTTTAGAGCTAGAAATAGCAAGTTAAAATAAGGCTAGTCCGTTATCAACTTGAAAAAGTGGGACCGAGTCGGTCC

SEQ ID NO: 4009 - protein, 30 aa, synthetic construct
MDSLLMNRRKFLYQFKNVRWAKGRRETYLC

SEQ ID NO: 4010 - protein, 28 aa, synthetic construct
PKKRKVEGADKRTADGSEFESPKKKRKV

SEQ ID NO: 4011 - protein, 22 aa, synthetic construct
RKSGKIAAIWKRPRKPKKKRKV

SEQ ID NO: 4012 - protein, 672 aa, Murine leukemia virus
TLNIEDEYRLHETSKEPDVSLGSTWLSDFPQAWAETGGMGLAVRQAPLIIPLKATSTPVSIKQYPMSQEARLGIKPHIQRLLDQGILVPCQSPWNTPLLPVKKPGTNDYRPVQDLREVNKRVEDIHPTVPNPYNLLSGLPPSHQWYTVLDLKDAFFCLRLHPTSQPLFAFEWRDPEMGISGQLTWTRLPQGFKNSPTLFDEALHRDLADFRIQHPDLILLQYVDDLLLAATSELDCQQGTRALLQTLGNLGYRASAKKAQICQKQVKYLGYLLKEGQRWLTEARKETVMGQPTPKTPRQLREFLGTAGFCRLWIPGFAEMAAPLYPLTKTGTLFNWGPDQQKAYQEIKQALLTAPALGLPDLTKPFELFVDEKQGYAKGVLTQKLGPWRRPVAYLSKKLDPVAAGWPPCLRMVAAIAVLTKDAGKLTMGQPLVILAPHAVEALVKQPPDRWLSNARMTHYQALLLDTDRVQFGPVVALNPATLLPLPEEGLQHNCLDILAEAHGTRPDLTDQPLPDADHTWYTDGSSLLQEGQRKAGAAVTTETEVIWAKALPAGTSAQRAELIALTQALKMAEGKKLNVYTDSRYAFATAHIHGEIYRRRGLLTSEGKEIKNKDEILALLKALFLPKRLSIIHCPGHQKGHSAEARGNRMADQAARKAAITETPDTSTLLI

SEQ ID NO: 4013 - protein, 671 aa, Murine leukemia virus
TLNIEDEHRLHETSKEPDVSLGSTWLSDFPQAWAETGGMGLAVRQAPLIIPLKATSTPVSIKQYPMSQEARLGIKPHIQRLLDQGILVPCQSPWNTPLLPVKKPGTNDYRPVQDLREVNKRVEDIHPTVPNPYNLLSGLPPSHQWYTVLDLKDAFFCLRLHPTSQPLFAFEWRDPEMGISGQLTWTRLPQGFKNSPTLFDEALHRDLADFRIQHPDLILLQYVDDLLLAATSELDCQQGTRALLQTLGNLGYRASAKKAQICQKQVKYLGYLLKEGQRWLTEARKETVMGQPTPKTPRQLREFLGTAGFCRLWIPGFAEMAAPLYPLTKTGTLFNWGPDQQKAYQEIKQALLTAPALGLPDLTKPFELFVDEKQGYAKGVLTQKLGPWRRPVAYLSKKLDPVAAGWPPCLRMVAAIAVLTKDAGKLTMGQPLVILAPHAVEALVKQPPDRWLSNARMTHYQALLLDTDRVQFGPVVALNPATLLPLPEEGLQHNCLDILAEAHGTRPDLTDQPLPDADHTWYTDGSSLLQEGQRKAGAAVTTETEVIWAKALPAGTSAQRAELIALTQALKMAEGKKLNVYTDSRYAFATAHIHGEIYRRRGLLTSEGKEIKNKDEILALLKALFLPKRLSIIHCPGHQKGHSAEARGNRMADQAARKAAITETPDTSTLL

SEQ ID NO: 4014 - protein, 660 aa, Murine leukemia virus
TLNIEDEHRLHETSKEPDVSLGSTWLSDFPQAWAETGGMGLAVRQAPLIIPLKATSTPVSIKQYPMSQEARLGIKPHIQRLLDQGILVPCQSPWNTPLLPVKKPGTNDYRPVQDLREVNKRVEDIHPTVPNPYNLLSGLPPSHQWYTVLDLKDAFFCLRLHPTSQPLFAFEWRDPEMGISGQLTWTRLPQGFKNSPTLFDEALHRDLADFRIQHPDLILLQYVDDLLLAATSELDCQQGTRALLQTLGNLGYRASAKKAQICQKQVKYLGYLLKEGQRWLTEARKETVMGQPTPKTPRQLREFLGTAGFCRLWIPGFAEMAAPLYPLTKTGTLFNWGPDQQKAYQEIKQALLTAPALGLPDLTKPFELFVDEKQGYAKGVLTQKLGPWRRPVAYLSKKLDPVAAGWPPCLRMVAAIAVLTKDAGKLTMGQPLVILAPHAVEALVKQPPDRWLSNARMTHYQALLLDTDRVQFGPVVALNPATLLPLPEEGLQHNCLDILAEAHGTRPDLTDQPLPDADHTWYTDGSSLLQEGQRKAGAAVTTETEVIWAKALPAGTSAQRAELIALTQALKMAEGKKLNVYTDSRYAFATAHIHGEIYRRRGLLTSEGKEIKNKDEILALLKALFLPKRLSIIHCPGHQKGHSAEARGNRMADQAARKAA

SEQ ID NO: 4015 - protein, 672 aa, synthetic construct
TLNIEDEYRLHETSKEPDVSLGSTWLSDFPQAWAETGGMGLAVRQAPLIIPLKATSTPVSIKQYPMSQEARLGIKPHIQRLLDQGILVPCQSPWNTPLLPVKKPGTNDYRPVQDLREVNKRVEDIHPTVPNPYNLLSGLPPSHQWYTVLDLKDAFFCLRLHPTSQPLFAFEWRDPEMGISGQLTWTRLPQGFKNSPTLFNEALHRDLADFRIQHPDLILLQYVDDLLLAATSELDCQQGTRALLQTLGNLGYRASAKKAQICQKQVKYLGYLLKEGQRWLTEARKETVMGQPTPKTPRQLREFLGKAGFCRLFIPGFAEMAAPLYPLTKPGTLFNWGPDQQKAYQEIKQALLTAPALGLPDLTKPFELFVDEKQGYAKGVLTQKLGPWRRPVAYLSKKLDPVAAGWPPCLRMVAAIAVLTKDAGKLTMGQPLVILAPHAVEALVKQPPDRWLSNARMTHYQALLLDTDRVQFGPVVALNPATLLPLPEEGLQHNCLDILAEAHGTRPDLTDQPLPDADHTWYTDGSSLLQEGQRKAGAAVTTETEVIWAKALPAGTSAQRAELIALTQALKMAEGKKLNVYTDSRYAFATAHIHGEIYRRRGWLTSEGKEIKNKDEILALLKALFLPKRLSIIHCPGHQKGHSAEARGNRMADQAARKAAITETPDTSTLLI

SEQ ID NO: 4016 - protein, 29 aa, synthetic construct
PKKKRKVEGADKRTADGSEFESPKKKRKV

SEQ ID NO: 4017 - protein, 25 aa, synthetic construct
KRASSQALGTIPKRRSSSRFIKRKK

SEQ ID NO: 4018 - protein, 7 aa, synthetic construct
RKKRKKK

SEQ ID NO: 4019-4024 - skipped (6 entries)

SEQ ID NO: 4025 - protein, 4 aa, synthetic construct
SGGS

SEQ ID NO: 4026 - protein, 4 aa, synthetic construct
GGGS

SEQ ID NO: 4027 - protein, 5 aa, synthetic construct
GGGGS

SEQ ID NO: 4028 - protein, 5 aa, synthetic construct
EAAAK

SEQ ID NO: 4029 - DNA, 306 bp, synthetic construct
  source 1..306: mol_type = other DNA
tgcctgtcatacgaaaccgagatactgacagtagaatatggccttctgccaatcgggaagattgtggagaaacggatagaatgcacagtttactctgtcgataacaatggtaacatttatactcagccagttgcccagtggcacgaccggggagagcaggaagtattcgaatactgtctggaggatggaagtctcattagggccactaaggaccacaaatttatgacagtcgatggccagatgctgcctatagacgaaatctttgagcgagagttggacctcatgcgagttgacaaccttcctaat

SEQ ID NO: 4030 - protein, 102 aa, synthetic construct
CLSYETEILTVEYGLLPIGKIVEKRIECTVYSVDNNGNIYTQPVAQWHDRGEQEVFEYCLEDGSLIRATKDHKFMTVDGQMLPIDEIFERELDLMRVDNLPN

SEQ ID NO: 4031 - DNA, 108 bp, synthetic construct
  source 1..108: mol_type = other DNA
atgatcaagatagctacaaggaagtatcttggcaaacaaaacgtttatgatattggagtcgaaagagatcacaactttgctctgaagaacggattcatagcttctaat

SEQ ID NO: 4032 - protein, 36 aa, synthetic construct
MIKIATRKYLGKQNVYDIGVERDHNFALKNGFIASN

SEQ ID NO: 4033 - DNA, 303 bp, synthetic construct
  source 1..303: mol_type = other DNA
tgcctgtcttatgataccgagatacttaccgttgaatatggcttcttgcctattggaaagattgtcgaagagagaattgaatgcacagtatatactgtagacaagaatggtttcgtttacacacagcccattgctcaatggcacaatcgcggcgaacaagaagtatttgagtactgtctcgaggatggaagcatcatacgagcaactaaagatcataaattcatgaccactgacgggcagatgttgccaatagatgagatattcgagcggggcttggatctcaaacaagtggatggattgcca

SEQ ID NO: 4034 - protein, 101 aa, synthetic construct
CLSYDTEILTVEYGFLPIGKIVEERIECTVYTVDKNGFVYTQPIAQWHNRGEQEVFEYCLEDGSIIRATKDHKFMTTDGQMLPIDEIFERGLDLKQVDGLP

SEQ ID NO: 4035 - DNA, 159 bp, synthetic construct
  source 1..159: mol_type = other DNA
atgaagaggactgccgatggatcagagtttgaatctcccaagaagaagaggaaagtaaagataatatctcgaaaaagtcttggtacccaaaatgtctatgatattggagtggagaaagatcacaacttccttctcaagaacggtctcgtagccagcaac

SEQ ID NO: 4036 - protein, 53 aa, synthetic construct
MKRTADGSEFESPKKKRKVKIISRKSLGTQNVYDIGVEKDHNFLLKNGLVASN

SEQ ID NO: 4037-4101 - skipped (65 entries)

SEQ ID NO: 4102 - protein, 6 aa, synthetic construct
GGSGGS

SEQ ID NO: 4103 - protein, 9 aa, synthetic construct
GGSGGSGGS

SEQ ID NO: 4104 - protein, 12 aa, synthetic construct
GGSGGSGGSGGS

SEQ ID NO: 4105 - protein, 15 aa, synthetic construct
GGSGGSGGSGGSGGS

SEQ ID NO: 4106 - protein, 18 aa, synthetic construct
GGSGGSGGSGGSGGSGGS

SEQ ID NO: 4107 - protein, 5 aa, synthetic construct
GGGGS

SEQ ID NO: 4108 - protein, 10 aa, synthetic construct
GGGGSGGGGS

SEQ ID NO: 4109 - protein, 15 aa, synthetic construct
GGGGSGGGGSGGGGS

SEQ ID NO: 4110 - protein, 20 aa, synthetic construct
GGGGSGGGGSGGGGSGGGGS

SEQ ID NO: 4111 - protein, 25 aa, synthetic construct
GGGGSGGGGSGGGGSGGGGSGGGGS

SEQ ID NO: 4112 - protein, 30 aa, synthetic construct
GGGGSGGGGSGGGGSGGGGSGGGGSGGGGS

SEQ ID NO: 4113 - skipped

SEQ ID NO: 4114 - protein, 4 aa, synthetic construct
GGGG

SEQ ID NO: 4115 - protein, 5 aa, synthetic construct
GGGGG

SEQ ID NO: 4116 - protein, 6 aa, synthetic construct
GGGGGG

SEQ ID NO: 4117 - protein, 7 aa, synthetic construct
GGGGGGG

SEQ ID NO: 4118 - protein, 8 aa, synthetic construct
GGGGGGGG

SEQ ID NO: 4119 - skipped

SEQ ID NO: 4120 - protein, 6 aa, synthetic construct
GSSGSS

SEQ ID NO: 4121 - protein, 9 aa, synthetic construct
GSSGSSGSS

SEQ ID NO: 4122 - protein, 12 aa, synthetic construct
GSSGSSGSSGSS

SEQ ID NO: 4123 - protein, 15 aa, synthetic construct
GSSGSSGSSGSSGSS

SEQ ID NO: 4124 - protein, 18 aa, synthetic construct
GSSGSSGSSGSSGSSGSS

SEQ ID NO: 4125 - protein, 5 aa, synthetic construct
EAAAK

SEQ ID NO: 4126 - protein, 10 aa, synthetic construct
EAAAKEAAAK

SEQ ID NO: 4127 - protein, 15 aa, synthetic construct
EAAAKEAAAKEAAAK

SEQ ID NO: 4128 - protein, 20 aa, synthetic construct
EAAAKEAAAKEAAAKEAAAK

SEQ ID NO: 4129 - protein, 25 aa, synthetic construct
EAAAKEAAAKEAAAKEAAAKEAAAK

SEQ ID NO: 4130 - protein, 30 aa, synthetic construct
EAAAKEAAAKEAAAKEAAAKEAAAKEAAAK

SEQ ID NO: 4131 - skipped

SEQ ID NO: 4132 - protein, 5 aa, synthetic construct
PAPAP

SEQ ID NO: 4133 - protein, 7 aa, synthetic construct
PAPAPAP

SEQ ID NO: 4134 - protein, 9 aa, synthetic construct
PAPAPAPAP

SEQ ID NO: 4135 - protein, 11 aa, synthetic construct
PAPAPAPAPAP

SEQ ID NO: 4136 - protein, 13 aa, synthetic construct
PAPAPAPAPAPAP

SEQ ID NO: 4137 - protein, 6 aa, synthetic construct
GGSGGG

SEQ ID NO: 4138 - protein, 6 aa, synthetic construct
GGGGGS

SEQ ID NO: 4139 - protein, 6 aa, synthetic construct
GGSGSS

SEQ ID NO: 4140 - protein, 6 aa, synthetic construct
GSSGGS

SEQ ID NO: 4141 - protein, 8 aa, synthetic construct
GGSEAAAK

SEQ ID NO: 4142 - protein, 8 aa, synthetic construct
EAAAKGGS

SEQ ID NO: 4143 - protein, 6 aa, synthetic construct
GGSPAP

SEQ ID NO: 4144 - protein, 6 aa, synthetic construct
PAPGGS

SEQ ID NO: 4145 - protein, 6 aa, synthetic construct
GGGGSS

SEQ ID NO: 4146 - protein, 6 aa, synthetic construct
GSSGGG

SEQ ID NO: 4147 - protein, 8 aa, synthetic construct
GGGEAAAK

SEQ ID NO: 4148 - protein, 8 aa, synthetic construct
EAAAKGGG

SEQ ID NO: 4149 - protein, 6 aa, synthetic construct
GGGPAP

SEQ ID NO: 4150 - protein, 6 aa, synthetic construct
PAPGGG

SEQ ID NO: 4151 - protein, 8 aa, synthetic construct
GSSEAAAK

SEQ ID NO: 4152 - protein, 8 aa, synthetic construct
EAAAKGSS

SEQ ID NO: 4153 - protein, 6 aa, synthetic construct
GSSPAP

SEQ ID NO: 4154 - protein, 6 aa, synthetic construct
PAPGSS

SEQ ID NO: 4155 - protein, 8 aa, synthetic construct
EAAAKPAP

SEQ ID NO: 4156 - protein, 8 aa, synthetic construct
PAPEAAAK

SEQ ID NO: 4157 - protein, 9 aa, synthetic construct
GGSGGGGSS

SEQ ID NO: 4158 - protein, 9 aa, synthetic construct
GGSGSSGGG

SEQ ID NO: 4159 - protein, 9 aa, synthetic construct
GGGGGSGSS

SEQ ID NO: 4160 - protein, 9 aa, synthetic construct
GGGGSSGGS

SEQ ID NO: 4161 - protein, 9 aa, synthetic construct
GSSGGSGGG

SEQ ID NO: 4162 - protein, 9 aa, synthetic construct
GSSGGGGGS

SEQ ID NO: 4163 - protein, 11 aa, synthetic construct
GGSGGGEAAAK

SEQ ID NO: 4164 - protein, 11 aa, synthetic construct
GGSEAAAKGGG

SEQ ID NO: 4165 - protein, 11 aa, synthetic construct
GGGGGSEAAAK

SEQ ID NO: 4166 - protein, 11 aa, synthetic construct
GGGEAAAKGGS

SEQ ID NO: 4167 - protein, 11 aa, synthetic construct
EAAAKGGSGGG

SEQ ID NO: 4168 - protein, 11 aa, synthetic construct
EAAAKGGGGGS

SEQ ID NO: 4169 - protein, 9 aa, synthetic construct
GGSGGGPAP

SEQ ID NO: 4170 - protein, 9 aa, synthetic construct
GGSPAPGGG

SEQ ID NO: 4171 - protein, 9 aa, synthetic construct
GGGGGSPAP

SEQ ID NO: 4172 - protein, 9 aa, synthetic construct
GGGPAPGGS

SEQ ID NO: 4173 - protein, 9 aa, synthetic construct
PAPGGSGGG

SEQ ID NO: 4174 - protein, 9 aa, synthetic construct
PAPGGGGGS

SEQ ID NO: 4175 - protein, 11 aa, synthetic construct
GGSGSSEAAAK

SEQ ID NO: 4176 - protein, 11 aa, synthetic construct
GGSEAAAKGSS

SEQ ID NO: 4177 - protein, 11 aa, synthetic construct
GSSGGSEAAAK

SEQ ID NO: 4178 - protein, 11 aa, synthetic construct
GSSEAAAKGGS

SEQ ID NO: 4179 - protein, 11 aa, synthetic construct
EAAAKGGSGSS

SEQ ID NO: 4180 - protein, 11 aa, synthetic construct
EAAAKGSSGGS

SEQ ID NO: 4181 - protein, 9 aa, synthetic construct
GGSGSSPAP

SEQ ID NO: 4182 - protein, 9 aa, synthetic construct
GGSPAPGSS

SEQ ID NO: 4183 - protein, 9 aa, synthetic construct
GSSGGSPAP

SEQ ID NO: 4184 - protein, 9 aa, synthetic construct
GSSPAPGGS

SEQ ID NO: 4185 - protein, 9 aa, synthetic construct
PAPGGSGSS

SEQ ID NO: 4186 - protein, 9 aa, synthetic construct
PAPGSSGGS

SEQ ID NO: 4187 - protein, 11 aa, synthetic construct
GGSEAAAKPAP

SEQ ID NO: 4188 - protein, 11 aa, synthetic construct
GGSPAPEAAAK

SEQ ID NO: 4189 - protein, 11 aa, synthetic construct
EAAAKGGSPAP

SEQ ID NO: 4190 - protein, 11 aa, synthetic construct
EAAAKPAPGGS

SEQ ID NO: 4191 - protein, 11 aa, synthetic construct
PAPGGSEAAAK

SEQ ID NO: 4192 - protein, 11 aa, synthetic construct
PAPEAAAKGGS

SEQ ID NO: 4193 - protein, 11 aa, synthetic construct
GGGGSSEAAAK

SEQ ID NO: 4194 - protein, 11 aa, synthetic construct
GGGEAAAKGSS

SEQ ID NO: 4195 - protein, 11 aa, synthetic construct
GSSGGGEAAAK

SEQ ID NO: 4196 - protein, 11 aa, synthetic construct
GSSEAAAKGGG

SEQ ID NO: 4197 - protein, 11 aa, synthetic construct
EAAAKGGGGSS

SEQ ID NO: 4198 - protein, 11 aa, synthetic construct
EAAAKGSSGGG

SEQ ID NO: 4199 - protein, 9 aa, synthetic construct
GGGGSSPAP

SEQ ID NO: 4200 - protein, 9 aa, synthetic construct
GGGPAPGSS

SEQ ID NO: 4201 - protein, 9 aa, synthetic construct
GSSGGGPAP

SEQ ID NO: 4202 - protein, 9 aa, synthetic construct
GSSPAPGGG

SEQ ID NO: 4203 - protein, 9 aa, synthetic construct
PAPGGGGSS

SEQ ID NO: 4204 - protein, 9 aa, synthetic construct
PAPGSSGGG

SEQ ID NO: 4205 - protein, 11 aa, synthetic construct
GGGEAAAKPAP

SEQ ID NO: 4206 - protein, 11 aa, synthetic construct
GGGPAPEAAAK

SEQ ID NO: 4207 - protein, 11 aa, synthetic construct
EAAAKGGGPAP

SEQ ID NO: 4208 - protein, 11 aa, synthetic construct
EAAAKPAPGGG

SEQ ID NO: 4209 - protein, 11 aa, synthetic construct
PAPGGGEAAAK

SEQ ID NO: 4210 - protein, 11 aa, synthetic construct
PAPEAAAKGGG

SEQ ID NO: 4211 - protein, 11 aa, synthetic construct
GSSEAAAKPAP

SEQ ID NO: 4212 - protein, 11 aa, synthetic construct
GSSPAPEAAAK

SEQ ID NO: 4213 - protein, 11 aa, synthetic construct
EAAAKGSSPAP

SEQ ID NO: 4214 - protein, 11 aa, synthetic construct
EAAAKPAPGSS

SEQ ID NO: 4215 - protein, 11 aa, synthetic construct
PAPGSSEAAAK

SEQ ID NO: 4216 - protein, 11 aa, synthetic construct
PAPEAAAKGSS

SEQ ID NO: 4217 - protein, 46 aa, synthetic construct
AEAAAKEAAAKEAAAKEAAAKALEAEAAAKEAAAKEAAAKEAAAKA

SEQ ID NO: 4218 - protein, 15 aa, synthetic construct
GGGGSEAAAKGGGGS

SEQ ID NO: 4219 - protein, 15 aa, synthetic construct
EAAAKGGGGSEAAAK

SEQ ID NO: 4220 - protein, 16 aa, synthetic construct
SGSETPGTSESATPES

SEQ ID NO: 4221 - protein, 12 aa, synthetic construct
GSAGSAAGSGEF

SEQ ID NO: 4222 - protein, 33 aa, synthetic construct; identical to SEQ ID NO: 4006

SEQ ID NO: 4223 - protein, 30 aa, synthetic construct
AHFKISGEKRPSTDPGKKAKNPKKKKKKDP

SEQ ID NO: 4224 - protein, 12 aa, synthetic construct
AHRAKKMSKTHA

SEQ ID NO: 4225 - protein, 14 aa, synthetic construct
ASPEYVNLPINGNG

SEQ ID NO: 4226 - protein, 7 aa, synthetic construct
CTKRPRW

SEQ ID NO: 4227 - protein, 16 aa, synthetic construct
DKAKRVSRNKSEKKRR

SEQ ID NO: 4228 - protein, 15 aa, synthetic construct
EELRLKEELLKGIYA

SEQ ID NO: 4229 - protein, 16 aa, synthetic construct
EEQLRRRKNSRLNNTG

SEQ ID NO: 4230 - protein, 24 aa, synthetic construct
EVLKVIRTGKRKKKAWKRMVTKVC

SEQ ID NO: 4231 - protein, 15 aa, synthetic construct
HHHHHHHHHHHHQPH

SEQ ID NO: 4232 - protein, 17 aa, synthetic construct
HKKKHPDASVNFSEFSK

SEQ ID NO: 4233 - protein, 6 aa, synthetic construct
HKRTKK

SEQ ID NO: 4234 - protein, 29 aa, synthetic construct
IINGRKLKLKKSRRRSSQTSNNSFTSRRS

SEQ ID NO: 4235 - protein, 8 aa, synthetic construct
KAEQERRK

SEQ ID NO: 4236 - protein, 18 aa, synthetic construct
KEKRKRREELFIEQKKRK

SEQ ID NO: 4237 - protein, 14 aa, synthetic construct
KKGKDEWFSRGKKP

SEQ ID NO: 4238 - protein, 12 aa, synthetic construct
KKGPSVQKRKKT

SEQ ID NO: 4239 - protein, 16 aa, synthetic construct
KKKTVINDLLHYKKEK

SEQ ID NO: 4240 - protein, 17 aa, synthetic construct
KKNGGKGKNKPSAKIKK

SEQ ID NO: 4241 - protein, 13 aa, synthetic construct
KKPKWDDFKKKKK

SEQ ID NO: 4242 - protein, 6 aa, synthetic construct
KKRKKD

SEQ ID NO: 4243 - protein, 9 aa, synthetic construct
KKRRKRRRK

SEQ ID NO: 4244 - protein, 9 aa, synthetic construct
KKRRRRARK

SEQ ID NO: 4245 - protein, 7 aa, synthetic construct
KKSKRGR

SEQ ID NO: 4246 - protein, 8 aa, synthetic construct
KKSRKRGS

SEQ ID NO: 4247 - protein, 17 aa, synthetic construct
KKSTALSRELGKIMRRR

SEQ ID NO: 4248 - protein, 17 aa, synthetic construct
KKSYQDPEIIAHSRPRK

SEQ ID NO: 4249 - protein, 17 aa, synthetic construct
KKTGKNRKLKSKRVKTR

SEQ ID NO: 4250 - protein, 17 aa, synthetic construct
KKVSIAGQSGKLWRWKR

SEQ ID NO: 4251 - protein, 20 aa, synthetic construct
KKYENVVIKRSPRKRGRPRK

SEQ ID NO: 4252 - protein, 6 aa, synthetic construct
KNKKRK

SEQ ID NO: 4253 - protein, 6 aa, synthetic construct
KPKKKR

SEQ ID NO: 4254 - protein, 19 aa, synthetic construct
KRAMKDDSHGNSTSPKRRK

SEQ ID NO: 4255 - protein, 17 aa, synthetic construct
KRANSNLVAAYEKAKKK

SEQ ID NO: 4256 - protein, 22 aa, synthetic construct
KRASEDTTSGSPPKKSSAGPKR

SEQ ID NO: 4257 - protein, 16 aa, synthetic construct
KRFKRRWMVRKMKTKK

SEQ ID NO: 4258 - protein, 16 aa, synthetic construct
KRGLNSSFETSPKKVK

SEQ ID NO: 4259 - protein, 20 aa, synthetic construct
KRGNSSIGPNDLSKRKQRKK

SEQ ID NO: 4260 - protein, 23 aa, synthetic construct
KRIHSVSLSQSQIDPSKKVKRAK

SEQ ID NO: 4261 - protein, 15 aa, synthetic construct
KRKGKLKNKGSKRKK

SEQ ID NO: 4262 - protein, 13 aa, synthetic construct
KRRRRRRREKRKR

SEQ ID NO: 4263 - protein, 18 aa, synthetic construct
KRSNDRTYSPEEEKQRRA

SEQ ID NO: 4264 - protein, 21 aa, synthetic construct
KRTVATNGDASGAHRAKKMSK

SEQ ID NO: 4265 - protein, 20 aa, synthetic construct
KRVYNKGEDEQEHLPKGKKR

SEQ ID NO: 4266 - protein, 18 aa, synthetic construct
KSGKAPRRRAVSMDNSNK

SEQ ID NO: 4267 - protein, 19 aa, synthetic construct
KVNFLDMSLDDIIIYKELE

SEQ ID NO: 4268 - protein, 15 aa, synthetic construct
KVQHRIAKKTTRRRR

SEQ ID NO: 4269 - protein, 8 aa, synthetic construct
LSPSLSPL

SEQ ID NO: 4270 - protein, 30 aa, synthetic construct; identical to SEQ ID NO: 4009

SEQ ID NO: 4271 - protein, 52 aa, synthetic construct
MPQNEYIELHRKRYGYRLDYHEKKRKKESREAHERSKKAKKMIGLKAKLYHK

SEQ ID NO: 4272 - protein, 10 aa, synthetic construct
MVQLRPRASR

SEQ ID NO: 4273 - protein, 24 aa, synthetic construct
NNKLLAKRRKGGASPKDDPMDDIK

SEQ ID NO: 4274 - protein, 20 aa, synthetic construct
NYKRPMDGTYGPPAKRHEGE

SEQ ID NO: 4275 - protein, 19 aa, synthetic construct
PDTKRAKLDSSETTMVKKK

SEQ ID NO: 4276 - protein, 7 aa, synthetic construct
PEKRTKI

SEQ ID NO: 4277 - protein, 8 aa, synthetic construct
PGGRGKKK

SEQ ID NO: 4278 - protein, 18 aa, synthetic construct
PGKMDKGEHRQERRDRPY

SEQ ID NO: 4279 - protein, 11 aa, synthetic construct
PKKGDKYDKTD

SEQ ID NO: 4280 - protein, 7 aa, synthetic construct
PKKKSRK

SEQ ID NO: 4281 - protein, 7 aa, synthetic construct
PKKNKPE

SEQ ID NO: 4282 - protein, 7 aa, synthetic construct
PKKRAKV

SEQ ID NO: 4283 - protein, 9 aa, synthetic construct
PKPKKLKVE

SEQ ID NO: 4284 - protein, 7 aa, synthetic construct
PKRGRGR

SEQ ID NO: 4285 - protein, 9 aa, synthetic construct
PKRRLVDDA

SEQ ID NO: 4286 - protein, 7 aa, synthetic construct
PKRRRTY

SEQ ID NO: 4287 - protein, 6 aa, synthetic construct
PLFKRR

SEQ ID NO: 4288 - protein, 7 aa, synthetic construct
PLRKAKR

SEQ ID NO: 4289 - protein, 9 aa, synthetic construct
PPAKRKCIF

SEQ ID NO: 4290 - protein, 8 aa, synthetic construct
PPARRRRL

SEQ ID NO: 4291 - protein, 8 aa, synthetic construct
PPKKKRKV

SEQ ID NO: 4292 - protein, 10 aa, synthetic construct
PPNKRMKVKH

SEQ ID NO: 4293 - protein, 13 aa, synthetic construct
PPRIYPQLPSAPT

SEQ ID NO: 4294 - protein, 13 aa, synthetic construct
PQRSPFPKSSVKR

SEQ ID NO: 4295 - protein, 8 aa, synthetic construct
PRPRKVPR

SEQ ID NO: 4296 - protein, 9 aa, synthetic construct
PRRRVQRKR

SEQ ID NO: 4297 - protein, 7 aa, synthetic construct
PRRVRLK

SEQ ID NO: 4298 - protein, 7 aa, synthetic construct
PSRKRPR

SEQ ID NO: 4299 - protein, 8 aa, synthetic construct
PSSKKRKV

SEQ ID NO: 4300 - protein, 7 aa, synthetic construct
PTKKRVK

SEQ ID NO: 4301 - protein, 9 aa, synthetic construct
QRPGPYDRP

SEQ ID NO: 4302 - protein, 18 aa, synthetic construct
RGKGGKGLGKGGAKRHRK

SEQ ID NO: 4303 - protein, 24 aa, synthetic construct
RKAGKGGGGHKTTKKRSAKDEKVP

SEQ ID NO: 4304 - protein, 9 aa, synthetic construct
RKIKLKRAK

SEQ ID NO: 4305 - protein, 9 aa, synthetic construct
RKIKRKRAK

SEQ ID NO: 4306 - protein, 17 aa, synthetic construct
RKKEAPGPREELRSRGR

SEQ ID NO: 4307 - protein, 7 aa, synthetic construct
RKKRKGK

SEQ ID NO: 4308 - protein, 9 aa, synthetic construct
RKKRRQRRR

SEQ ID NO: 4309 - protein, 25 aa, synthetic construct
RKKSIPLSIKNLKRKHKRKKNKITR

SEQ ID NO: 4310 - protein, 20 aa, synthetic construct
RKLVKPKNTKMKTKLRTNPY

SEQ ID NO: 4311 - protein, 16 aa, synthetic construct
RKRLILSDKGQLDWKK

SEQ ID NO: 4312 - protein, 7 aa, synthetic construct
RKRLKSK

SEQ ID NO: 4313 - protein, 9 aa, synthetic construct
RKRRVRDNM

SEQ ID NO: 4314 - protein, 22 aa, synthetic construct
RKRSPKDKKEKDLDGAGKRRKT

SEQ ID NO: 4315 - protein, 22 aa, synthetic construct
RKRTPRVDGQTGENDMNKRRRK

SEQ ID NO: 4316 - protein, 10 aa, synthetic construct
RLPVRRRRRR

SEQ ID NO: 4317 - protein, 10 aa, synthetic construct
RLRFRKPKSK

SEQ ID NO: 4318 - protein, 6 aa, synthetic construct
RQQRKR

SEQ ID NO: 4319 - protein, 16 aa, synthetic construct
RRDLNSSFETSPKKVK

SEQ ID NO: 4320 - protein, 8 aa, synthetic construct
RRDRAKLR

SEQ ID NO: 4321 - protein, 8 aa, synthetic construct
RRGDGRRR

SEQ ID NO: 4322 - protein, 11 aa, synthetic construct
RRGRKRKAEKQ

SEQ ID NO: 4323 - protein, 6 aa, synthetic construct
RRKKRR

SEQ ID NO: 4324 - protein, 19 aa, synthetic construct
RRKRSKSEDMDSVESKRRR

SEQ ID NO: 4325 - protein, 6 aa, synthetic construct
RRKRSR

SEQ ID NO: 4326 - protein, 14 aa, synthetic construct
RRPKGKTLQKRKPK

SEQ ID NO: 4327 - protein, 18 aa, synthetic construct
RRRGFERFGPDNMGRKRK

SEQ ID NO: 4328 - protein, 15 aa, synthetic construct
RRRGKNKVAAQNCRK

SEQ ID NO: 4329 - protein, 6 aa, synthetic construct
RRRKRR

SEQ ID NO: 4330 - protein, 14 aa, synthetic construct
RRRQKQKGGASRRR

SEQ ID NO: 4331 - protein, 13 aa, synthetic construct
RRRREGPRARRRR

SEQ ID NO: 4332 - protein, 61 aa, synthetic construct
RRTIRLKLVYDKCDRSCKIQKKNRNKCQYCRFHKCLSVGMSHNAIRFGRMPRSEKAKLKAE

SEQ ID NO: 4333 - protein, 17 aa, synthetic construct
RRVPQRKEVSRCRKCRK

SEQ ID NO: 4334 - protein, 32 aa, synthetic construct
RVGGRRQAVECIEDLLNEPGQPLDLSCKRPRP

SEQ ID NO: 4335 - protein, 9 aa, synthetic construct
RVVKLRIAP

SEQ ID NO: 4336 - protein, 6 aa, synthetic construct
RVVRRR

SEQ ID NO: 4337 - protein, 12 aa, synthetic construct
SKRKTKISRKTR

SEQ ID NO: 4338 - protein, 16 aa, synthetic construct
SYVKTVPNRTRTYIKL

SEQ ID NO: 4339 - protein, 12 aa, synthetic construct
TGKNEAKKRKIA

SEQ ID NO: 4340 - protein, 30 aa, synthetic construct
TLSPASSPSSVSCPVIPASTDESPGSALNI

SEQ ID NO: 4341 - protein, 12 aa, synthetic construct
VSKKQRTGKKIH

SEQ ID NO: 4342 - protein, 9 aa, synthetic construct
SPKKKRKVE

SEQ ID NO: 4343 - protein, 19 aa, synthetic construct
KRTADGSEFESPKKKRKVE

SEQ ID NO: 4344 - protein, 9 aa, synthetic construct
PAAKRVKLD

SEQ ID NO: 4345 - protein, 7 aa, synthetic construct
PKKKRKV

SEQ ID NO: 4346 - protein, 30 aa, synthetic construct; identical to SEQ ID NO: 4009

SEQ ID NO: 4347 - protein, 11 aa, synthetic construct
SPKKKRKVEAS

SEQ ID NO: 4348 - protein, 16 aa, synthetic construct
MAPKKKRKVGIHRGVP

SEQ ID NO: 4349-4399 - skipped (51 entries)

SEQ ID NO: 4400 - DNA, 99 bp, synthetic construct
  source 1..99: mol_type = other DNA
tctggaggatctagcggaggatcctctggcagcgagacaccaggaacaagcgagtcagcaacaccagagagcagtggcggcagcagcggcggcagcagc

SEQ ID NO: 4401 - protein, 33 aa, synthetic construct; identical to SEQ ID NO: 4006

SEQ ID NO: 4402 - DNA, 138 bp, synthetic construct
  source 1..138: mol_type = other DNA
gccgaagccgccgccaaggaggccgccgctaaggaggctgctgccaaggaagctgctgctaaggctttagaagctgaagctgctgccaaagaagctgccgccaaagaggctgccgcaaaggaggccgctgccaaggct

SEQ ID NO: 4403 - protein, 46 aa, synthetic construct; identical to SEQ ID NO: 4217

SEQ ID NO: 4404 - protein, 958 aa, synthetic construct
GASFDLSPGLQRILDKVSSPLENEKLKSMTINFSSLNRKNTELNEEQEVISNLETKQVQGISFSSNNEVKSKIEMLENNANHDETSSLLPRKESNIVDDNGLIPPTPIPTSASKLTFPGILETPVNPWKTNNVLQPGESYLFGSPSDIKNHDLSPGSRNGFKDNSPISDTSFSLQLSQDGLQLTPASSSSESLSIIDVASDQNLFQTFIKEWRCKKRFSISLACEKIRSLTSSKTATIGSRFKQASSPQEIPIRDDGFPIKGCDDTLVVGLAVCWGGRDAYYFSLQKEQKHSEISASLVPPSLDPSLTLKDRMWYLQSCLRKESDKECSVVIYDFIQSYKILLLSCGISLEQSYEDPKVACWLLDPDSQEPTLHSIVTSFLPHELPLLEGMETSQGIQSLGLNAGSEHSGRYRASVESILIFNSMNQLNSLLQKENLQDVFRKVEMPSQYCLALLELNGIGFSTAECESQKHIMQAKLDAIETQAYQLAGHSFSFTSSDDIAEVLFLELKLPPNREMKNQGSKKTLGSTRRGIDNGRKLRLGRQFSTSKDVLNKLKALHPLPGLILEWRRITNAITKVVFPLQREKCLNPFLGMERIYPVSQSHTATGRITFTEPNIQNVPRDFEIKMPTLVGESPPSQAVGKGLLPMGRGKYKKGFSVNPRCQAQMEERAADRGMPFSISMRHAFVPFPGGSILAADYSQLELRILAHLSHDRRLIQVLNTGADVFRSIAAEWKMIEPESVGDDLRQQAKQICYGIIYGMGAKSLGEQMGIKENDAACYIDSFKSRYTGINQFMTETVKNCKRDGFVQTILGRRRYLPGIKDNNPYRKAHAERQAINTIVQGSAADIVKIATVNIQKQLETFHSTFKSHGHREGMLQSDQTGLSRKRKLQGMFCPIRGGFFILQLHDELLYEVAEEDVVQVAQIVKNEMESAVKLSVKLKVKVKIGASWGELKDFDV

SEQ ID NO: 4405 - protein, 799 aa, synthetic construct
GFKDNSPISDTSFSLQLSQDGLQLTPASSSSESLSIIDVASDQNLFQTFIKEWRCKKRFSISLACEKIRSLTSSKTATIGSRFKQASSPQEIPIRDDGFPIKGCDDTLVVGLAVCWGGRDAYYFSLQKEQKHSEISASLVPPSLDPSLTLKDRMWYLQSCLRKESDKECSVVIYDFIQSYKILLLSCGISLEQSYEDPKVACWLLDPDSQEPTLHSIVTSFLPHELPLLEGMETSQGIQSLGLNAGSEHSGRYRASVESILIFNSMNQLNSLLQKENLQDVFRKVEMPSQYCLALLELNGIGFSTAECESQKHIMQAKLDAIETQAYQLAGHSFSFTSSDDIAEVLFLELKLPPNREMKNQGSKKTLGSTRRGIDNGRKLRLGRQFSTSKDVLNKLKALHPLPGLILEWRRITNAITKVVFPLQREKCLNPFLGMERIYPVSQSHTATGRITFTEPNIQNVPRDFEIKMPTLVGESPPSQAVGKGLLPMGRGKYKKGFSVNPRCQAQMEERAADRGMPFSISMRHAFVPFPGGSILAADYSQLELRILAHLSHDRRLIQVLNTGADVFRSIAAEWKMIEPESVGDDLRQQAKQICYGIIYGMGAKSLGEQMGIKENDAACYIDSFKSRYTGINQFMTETVKNCKRDGFVQTILGRRRYLPGIKDNNPYRKAHAERQAINTIVQGSAADIVKIATVNIQKQLETFHSTFKSHGHREGMLQSDQTGLSRKRKLQGMFCPIRGGFFILQLHDELLYEVAEEDVVQVAQIVKNEMESAVKLSVKLKVKVKIGASWGELKDFDV

SEQ ID NO: 4406 - protein, 772 aa, synthetic construct
SSSSESLSIIDVASDQNLFQTFIKEWRCKKRFSISLACEKIRSLTSSKTATIGSRFKQASSPQEIPIRDDGFPIKGCDDTLVVGLAVCWGGRDAYYFSLQKEQKHSEISASLVPPSLDPSLTLKDRMWYLQSCLRKESDKECSVVIYDFIQSYKILLLSCGISLEQSYEDPKVACWLLDPDSQEPTLHSIVTSFLPHELPLLEGMETSQGIQSLGLNAGSEHSGRYRASVESILIFNSMNQLNSLLQKENLQDVFRKVEMPSQYCLALLELNGIGFSTAECESQKHIMQAKLDAIETQAYQLAGHSFSFTSSDDIAEVLFLELKLPPNREMKNQGSKKTLGSTRRGIDNGRKLRLGRQFSTSKDVLNKLKALHPLPGLILEWRRITNAITKVVFPLQREKCLNPFLGMERIYPVSQSHTATGRITFTEPNIQNVPRDFEIKMPTLVGESPPSQAVGKGLLPMGRGKYKKGFSVNPRCQAQMEERAADRGMPFSISMRHAFVPFPGGSILAADYSQLELRILAHLSHDRRLIQVLNTGADVFRSIAAEWKMIEPESVGDDLRQQAKQICYGIIYGMGAKSLGEQMGIKENDAACYIDSFKSRYTGINQFMTETVKNCKRDGFVQTILGRRRYLPGIKDNNPYRKAHAERQAINTIVQGSAADIVKIATVNIQKQLETFHSTFKSHGHREGMLQSDQTGLSRKRKLQGMFCPIRGGFFILQLHDELLYEVAEEDVVQVAQIVKNEMESAVKLSVKLKVKVKIGASWGELKDFDV

SEQ ID NO: 4407 - protein, 652 aa, unidentified
SSSSESLSIIDVASDQNLFQTFIKEWRCKKRFSISLACEKIRGSGDDTLVVGLAVCWGGRDAYYFSLGGSGGLDPSLTLKDRMWYLQSCLRKESDKECSVVIYDFIQSYKILLLSCGISLEQSYEDPKVACWLLDPDSQEPTLHSIVTSFLPHELPLLEGMETSQGIQSLGLNAGSEHSGRYRASVESILIFNSMNQLNSLLQKENLQDVFRKVEMPSQYCLALLELNGIGFSTAECESQKHIMQAKLDAIETQAYQLAGHSFSFTSSDDIAEVLFLELKLPPGGSGGQFSTSKDVLNKLKALHPLPGLILEWRRITNAITKVVFPLQREKCLNPFLGMERIYPVSQSHTATGRITFTEPNIQNVPRDFEIKMGGSGGMPFSISMRHAFVPFPGGSILAADYSQLELRILAHLSHDRRLIQVLNTGADVFRSIAAEWKMIEPESVGDDLRQQAKQICYGIIYGMGAKSLGEQMGIKENDAACYIDSFKSRYTGINQFMTETVKNCKRDGFVQTILGRRRYLPGIKDNNPYRKAHAERQAINTIVQGSAADIVKIATVNIQKQLETFHSTFKSHGHREGMLQSDGGSGGCPIRGGFFILQLHDELLYEVAEEDVVQVAQIVKNEMESAVKLSVKLKVKVKIGASWGELKDFDV

SEQ ID NO: 4408 - protein, 1367 aa, synthetic construct
DKKYSIGLDIGTNSVGWAVITDEYKVPSKKFKVLGNTDRHSIKKNLIGALLFDSGETAEATRLKRTARRRYTRRKNRICYLQEIFSNEMAKVDDSFFHRLEESFLVEEDKKHERHPIFGNIVDEVAYHEKYPTIYHLRKKLVDSTDKADLRLIYLALAHMIKFRGHFLIEGDLNPDNSDVDKLFIQLVQTYNQLFEENPINASGVDAKAILSARLSKSRRLENLIAQLPGEKKNGLFGNLIALSLGLTPNFKSNFDLAEDAKLQLSKDTYDDDLDNLLAQIGDQYADLFLAAKNLSDAILLSDILRVNTEITKAPLSASMIKRYDEHHQDLTLLKALVRQQLPEKYKEIFFDQSKNGYAGYIDGGASQEEFYKFIKPILEKMDGTEELLVKLNREDLLRKQRTFDNGSIPHQIHLGELHAILRRQEDFYPFLKDNREKIEKILTFRIPYYVGPLARGNSRFAWMTRKSEETITPWNFEEVVDKGASAQSFIERMTNFDKNLPNEKVLPKHSLLYEYFTVYNELTKVKYVTEGMRKPAFLSGEQKKAIVDLLFKTNRKVTVKQLKEDYFKKIECFDSVEISGVEDRFNASLGTYHDLLKIIKDKDFLDNEENEDILEDIVLTLTLFEDREMIEERLKTYAHLFDDKVMKQLKRRRYTGWGRLSRKLINGIRDKQSGKTILDFLKSDGFANRNFMQLIHDDSLTFKEDIQKAQVSGQGDSLHEHIANLAGSPAIKKGILQTVKVVDELVKVMGRHKPENIVIEMARENQTTQKGQKNSRERMKRIEEGIKELGSQILKEHPVENTQLQNEKLYLYYLQNGRDMYVDQELDINRLSDYDVDHIVPQSFLKDDSIDNKVLTRSDKARGKSDNVPSEEVVKKMKNYWRQLLNAKLITQRKFDNLTKAERGGLSELDKAGFIKRQLVETRQITKHVAQILDSRMNTKYDENDKLIREVKVITLKSKLVSDFRKDFQFYKVREINNYHHAHDAYLNAVVGTALIKKYPKLESEFVYGDYKVYDVRKMIAKSEQEIGKATAKYFFYSNIMNFFKTEITLANGEIRKRPLIETNGETGEIVWDKGRDFATVRKVLSMPQVNIVKKTEVQTGGFSKESILPKRNSDKLIARKKDWDPKKYGGFDSPTVAYSVLVVAKVEKGKSKKLKSVKELLGITIMERSSFEKNPIDFLEAKGYKEVKKDLIIKLPKYSLFELENGRKRMLASAGELQKGNELALPSKYVNFLYLASHYEKLKGSPEDNEQKQLFVEQHKHYLDEIIEQISEFSKRVILADANLDKVLSAYNKHRDKPIREQAENIIHLFTLTNLGAPAAFKYFDTTIDRKRYTSTKEVLDATLIHQSITGLYETRIDLSQLGGD

SEQ ID NO: 4409 - RNA, 20 nt, synthetic construct
  source 1..20: mol_type = other RNA
  modified_base 1: mod_base = OTHER; note = 2'-O-methyl guanosine phosphorothioate
  modified_base 2: mod_base = OTHER; note = 2'-O-methyl cytidine phosphorothioate
  modified_base 3: mod_base = OTHER; note = 2'-O-methyl cytidine phosphorothioate
gccgaagcactgcacgccgt

SEQ ID NO: 4410 - RNA, 20 nt, synthetic construct
  source 1..20: mol_type = other RNA
  modified_base 1: mod_base = OTHER; note = 2'-O-methyl guanosine phosphorothioate
  modified_base 2: mod_base = OTHER; note = 2'-O-methyl cytidine phosphorothioate
  modified_base 3: mod_base = OTHER; note = 2'-O-methyl cytidine phosphorothioate
gccgaagcactgcacgccgt

SEQ ID NO: 4411 - RNA, 76 nt, synthetic construct
  source 1..76: mol_type = other RNA
gttttagagctagaaatagcaagttaaaataaggctagtccgttatcaacttgaaaaagtggcaccgagtcggtgc

SEQ ID NO: 4412 - RNA, 76 nt, synthetic construct; identical to SEQ ID NO: 4411
  source 1..76: mol_type = other RNA

SEQ ID NO: 4413 - DNA, 11 bp, synthetic construct
  source 1..11: mol_type = other DNA
cctgacgtacg

SEQ ID NO: 4414 - DNA, 11 bp, synthetic construct
  source 1..11: mol_type = other DNA
cctgacgtacg

SEQ ID NO: 4415 - RNA, 13 nt, synthetic construct
  source 1..13: mol_type = other RNA
  modified_base 10: mod_base = OTHER; note = guanosine phosphorothioate
  modified_base 11: mod_base = OTHER; note = 2'-O-methyl cytidine phosphorothioate
  modified_base 12: mod_base = OTHER; note = 2'-O-methyl uridine phosphorothioate
  modified_base 13: mod_base = OTHER; note = 2'-O-methyl uridine
gcgtgcagtgctt

SEQ ID NO: 4416 - RNA, 13 nt, synthetic construct
  source 1..13: mol_type = other RNA
  modified_base 10: mod_base = OTHER; note = guanosine phosphorothioate
  modified_base 11: mod_base = OTHER; note = 2'-O-methyl cytidine phosphorothioate
  modified_base 12: mod_base = OTHER; note = 2'-O-methyl uridine phosphorothioate
  modified_base 13: mod_base = OTHER; note = 2'-O-methyl uridine
gcgtgcagtgctt

SEQ ID NO: 4417 - RNA, 120 nt, synthetic construct
  source 1..120: mol_type = other RNA
  modified_base 1: mod_base = OTHER; note = 2'-O-methyl guanosine phosphorothioate
  modified_base 2: mod_base = OTHER; note = 2'-O-methyl cytidine phosphorothioate
  modified_base 3: mod_base = OTHER; note = 2'-O-methyl cytidine phosphorothioate
  modified_base 117: mod_base = OTHER; note = guanosine phosphorothioate
  modified_base 118: mod_base = OTHER; note = 2'-O-methyl cytidine phosphorothioate
  modified_base 119: mod_base = OTHER; note = 2'-O-methyl uridine phosphorothioate
  modified_base 120: mod_base = OTHER; note = 2'-O-methyl uridine
gccgaagcactgcacgccgtgttttagagctagaaatagcaagttaaaataaggctagtccgttatcaacttgaaaaagtggcaccgagtcggtgccctgacgtacggcgtgcagtgctt

SEQ ID NO: 4418 - RNA, 120 nt, synthetic construct; identical to SEQ ID NO: 4417
  source 1..120: mol_type = other RNA
  modified_base 1: mod_base = OTHER; note = 2'-O-methyl guanosine phosphorothioate
  modified_base 2: mod_base = OTHER; note = 2'-O-methyl cytidine phosphorothioate
  modified_base 3: mod_base = OTHER; note = 2'-O-methyl cytidine phosphorothioate
  modified_base 117: mod_base = OTHER; note = guanosine phosphorothioate
  modified_base 118: mod_base = OTHER; note = 2'-O-methyl cytidine phosphorothioate
  modified_base 119: mod_base = OTHER; note = 2'-O-methyl uridine phosphorothioate
  modified_base 120: mod_base = OTHER; note = 2'-O-methyl uridine

SEQ ID NO: 4419 - RNA, 20 nt, synthetic construct
  source 1..20: mol_type = other RNA
  modified_base 1: mod_base = OTHER; note = 2'-O-methyl guanosine phosphorothioate
  modified_base 2: mod_base = OTHER; note = 2'-O-methyl cytidine phosphorothioate
  modified_base 3: mod_base = OTHER; note = 2'-O-methyl cytidine phosphorothioate
gccgaagcactgcacgccgt

SEQ ID NO: 4420 - RNA, 76 nt, synthetic construct; identical to SEQ ID NO: 4411
  source 1..76: mol_type = other RNA

SEQ ID NO: 4421 - RNA, 11 nt, synthetic construct
  source 1..11: mol_type = other RNA
cctgacgtacg

SEQ ID NO: 4422 - RNA, 13 nt, synthetic construct
  source 1..13: mol_type = other RNA
  modified_base 10: mod_base = OTHER; note = guanosine phosphorothioate
  modified_base 11: mod_base = OTHER; note = 2'-O-methyl cytidine phosphorothioate
  modified_base 12: mod_base = OTHER; note = 2'-O-methyl uridine phosphorothioate
  modified_base 13: mod_base = OTHER; note = 2'-O-methyl uridine
gcgtgcagtgctt

SEQ ID NO: 4423 - RNA, 120 nt, synthetic construct; identical to SEQ ID NO: 4417
  source 1..120: mol_type = other RNA
  modified_base 1: mod_base = OTHER; note = 2'-O-methyl guanosine phosphorothioate
  modified_base 2: mod_base = OTHER; note = 2'-O-methyl cytidine phosphorothioate
  modified_base 3: mod_base = OTHER; note = 2'-O-methyl cytidine phosphorothioate
  modified_base 117: mod_base = OTHER; note = guanosine phosphorothioate
  modified_base 118: mod_base = OTHER; note = 2'-O-methyl cytidine phosphorothioate
  modified_base 119: mod_base = OTHER; note = 2'-O-methyl uridine phosphorothioate
  modified_base 120: mod_base = OTHER; note = 2'-O-methyl uridine

SEQ ID NO: 4424 - DNA, 16 bp, synthetic construct
  source 1..16: mol_type = other DNA
gcgcgctcgctcgctc

SEQ ID NO: 4425 - protein, 713 aa, synthetic construct
MATGQDRVVALVDMDCFFVQVEQRQNPHLRNKPCAVVQYKSWKGGGIIAVSYEARAFGVTRSMWADDAKKLCPDLLLAQVRESRGKANLTKYREASVEVMEIMSRFAVIERASIDEAYVDLTSAVQERLQKLQGQPISADLLPSTYIEGLPQGPTTAEETVQKEGMRKQGLFQWLDSLQIDNLTSPDLQLTVGAVIVEEMRAAIERETGFQCSAGISHNKVLAKLACGLNKPNRQTLVSHGSVPQLFSQMPIRKIRSLGGKLGASVIEILGIEYMGELTQFTESQLQSHFGEKNGSWLYAMCRGIEHDPVKPRQLPKTIGCSKNFPGKTALATREQVQWWLLQLAQELEERLTKDRNDNDRVATQLVVSIRVQGDKRLSSLRRCCALTRYDAHKMSHDAFTVIKNCNTSGIQTEWSPPLTMLFLCATKFSASAPSSSTDITSFLSSDPSSLPKVPVTSSEAKTQGSGPAVTATKKATTSLESFFQKAAERQKVKEASLSSLTAPTQAPMSNSPSKPSLPFQTSQSTGTEPFFKQKSLLLKQKQLNNSSVSSPQQNPWSNCKALPNSLPTEYPGCVPVCEGVSKLEESSKATPAEMDLAHNSQSMHASSASKSVLEVTQKATPNPSLLAAEDQVPCEKCGSLVPVWDMPEHMDYHFALELQKSFLQPHSSNPQVVSAVSHQGKRNPKSPLACTNKRPRPEGMQTLESFFKPLTH

SEQ ID NO: 4426 - protein, 740 aa, synthetic construct
MEKLGVEPEEEGGGDDDEEDAEAWAMELADVGAAASSQGVHDQVLPTPNASSRVIVHVDLDCFYAQVEMISNPELKDKPLGVQQKYLVVTCNYEARKLGVKKLMNVRDAKEKCPQLVLVNGEDLTRYREMSYKVTELLEEFSPVVERLGFDENFVDLTEMVEKRLQQLQSDELSAVTVSGHVYNNQSINLLDVLHIRLLVGSQIAAEMREAMYNQLGLTGCAGVASNKLLAKLVSGVFKPNQQTVLLPESCQHLIHSLNHIKEIPGIGYKTAKCLEALGINSVRDLQTFSPKILEKELGISVAQRIQKLSFGEDNSPVILSGPPQSFSEEDSFKKCSSEVEAKNKIEELLASLLNRVCQDGRKPHTVRLIIRRYSSEKHYGRESRQCPIPSHVIQKLGTGNYDVMTPMVDILMKLFRNMVNVKMPFHLTLLSVCFCNLKALNTAKKGLIDYYLMPSLSTTSRSGKHSFKMKDTHMEDFPKDKETNRDFLPSGRIESTRTRESPLDTTNFSKEKDINEFPLCSLPEGVDQEVFKQLPVDIQEEILSGKSREKFQGKGSVSCPLHASRGVLSFFSKKQMQDIPINPRDHLSSSKQVSSVSPCEPGTSGFNSSSSSYMSSQKDYSYYLDNRLKDERISQGPKEPQGFHFTNSNPAVSAFHSFPNLQSEQLFSRNHTTDSHKQTVATDSHEGLTENREPDSVDEKITFPSDIDPQVFYELPEAVQKELLAEWKRAGSDFHIGHK

SEQ ID NO: 4427 - protein, 870 aa, synthetic construct
MDSTKEKCDSYKDDLLLRMGLNDNKAGMEGLDKEKINKIIMEATKGSRFYGNELKKEKQVNQRIENMMQQKAQITSQQLRKAQLQVDRFAMELEQSRNLSNTIVHIDMDAFYAAVEMRDNPELKDKPIAVGSMSMLSTSNYHARRFGVRAAMPGFIAKRLCPQLIIVPPNFDKYRAVSKEVKEILADYDPNFMAMSLDEAYLNITKHLEERQNWPEDKRRYFIKMGSSVENDNPGKEVNKLSEHERSISPLLFEESPSDVQPPGDPFQVNFEEQNNPQILQNSVVFGTSAQEVVKEIRFRIEQKTTLTASAGIAPNTMLAKVCSDKNKPNGQYQILPNRQAVMDFIKDLPIRKVSGIGKVTEKMLKALGIITCTELYQQRALLSLLFSETSWHYFLHISLGLGSTHLTRDGERKSMSVERTFSEINKAEEQYSLCQELCSELAQDLQKERLKGRTVTIKLKNVNFEVKTRASTVSSVVSTAEEIFAIAKELLKTEIDADFPHPLRLRLMGVRISSFPNEEDRKHQQRSIIGFLQAGNQALSATECTLEKTDKDKFVKPLEMSHKKSFFDKKRSERKWSHQDTFKCEAVNKQSFQTSQPFQVLKKKMNENLEISENSDDCQILTCPVCFRAQGCISLEALNKHVDECLDGPSISENFKMFSCSHVSATKVNKKENVPASSLCEKQDYEAHPKIKEISSVDCIALVDTIDNSSKAESIDALSNKHSKEECSSLPSKSFNIEHCHQNSSSTVSLENEDVGSFRQEYRQPYLCEVKTGQALVCPVCNVEQKTSDLTLFNVHVDVCLNKSFIQELRKDKFNPVNQPKESSRSTGSSSGVQKAVTRTKRPGLMTKYSTSKKIKPNNPKHTLDIFFK

SEQ ID NO: 4428 - protein, 1251 aa, synthetic construct
MRRGGWRKRAENDGWETWGGYMAAKVQKLEEQFRSDAAMQKDGTSSTIFSGVAIYVNGYTDPSAEELRKLMMLHGGQYHVYYSRSKTTHIIATNLPNAKIKELKGEKVIRPEWIVESIKAGRLLSYIPYQLYTKQSSVQKGLSFNPVCRPEDPLPGPSNIAKQLNNRVNHIVKKIETENEVKVNGMNSWNEEDENNDFSFVDLEQTSPGRKQNGIPHPRGSTAIFNGHTPSSNGALKTQDCLVPMVNSVASRLSPAFSQEEDKAEKSSTDFRDCTLQQLQQSTRNTDALRNPHRTNSFSLSPLHSNTKINGAHHSTVQGPSSTKSTSSVSTFSKAAPSVPSKPSDCNFISNFYSHSRLHHISMWKCELTEFVNTLQRQSNGIFPGREKLKKMKTGRSALVVTDTGDMSVLNSPRHQSCIMHVDMDCFFVSVGIRNRPDLKGKPVAVTSNRGTGRAPLRPGANPQLEWQYYQNKILKGKAADIPDSSLWENPDSAQANGIDSVLSRAEIASCSYEARQLGIKNGMFFGHAKQLCPNLQAVPYDFHAYKEVAQTLYETLASYTHNIEAVSCDEALVDITEILAETKLTPDEFANAVRMEIKDQTKCAASVGIGSNILLARMATRKAKPDGQYHLKPEEVDDFIRGQLVTNLPGVGHSMESKLASLGIKTCGDLQYMTMAKLQKEFGPKTGQMLYRFCRGLDDRPVRTEKERKSVSAEINYGIRFTQPKEAEAFLLSLSEEIQRRLEATGMKGKRLTLKIMVRKPGAPVETAKFGGHGICDNIARTVTLDQATDNAKIIGKAMLNMFHTMKLNISDMRGVGIHVNQLVPTNLNPSTCPSRPSVQSSHFPSGSYSVRDVFQVQKAKKSTEEEHKEVFRAAVDLEISSASRTCTFLPPFPAHLPTSPDTNKAESSGKWNGLHTPVSVQSRLNLSIEVPSPSQLDQSVLEALPPDLREQVEQVCAVQQAESHGDKKKEPVNGCNTGILPQPVGTVLLQIPEPQESNSDAGINLIALPAFSQVDPEVFAALPAELQRELKAAYDQRQRQGENSTHQQSASASVPKNPLLHLKAAVKEKKRNKKKKTIGSPKRIQSPLNNKLLNSPAKTLPGACGSPQKLIDGFLKHEGPPAEKPLEELSASTSGVPGLSSLQSDPAGCVRPPAPNLAGAVEFNDVKTLLREWITTISDPMEEDILQVVKYCTDLIEEKDLEKLDLVIKYMKRLMQQSVESVWNMAFDFILDNVQVVLQQTYGSTLKVT

SEQ ID NO: 4429 - protein, 335 aa, synthetic construct
MSKRKAPQETLNGGITDMLTELANFEKNVSQAIHKYNAYRKAASVIAKYPHKIKSGAEAKKLPGVGTKIAEKIDEFLATGKLRKLEKIRQDDTSSSINFLTRVSGIGPSAARKFVDEGIKTLEDLRKNEDKLNHHQRIGLKYFGDFEKRIPREEMLQMQDIVLNEVKKVDSEYIATVCGSFRRGAESSGDMDVLLTHPSFTSESTKQPKLLHQVVEQLQKVHFITDTLSKGETKFMGVCQLPSKNDEKEYPHRRIDIRLIPKDQYYCGVLYFTGSDIFNKNMRAHALEKGFTINEYTIRPLGVTGVAGEPLPVDSEKDIFDYIQWKYREPKDRSE

SEQ ID NO: 4430 - protein, 575 aa, synthetic construct
MDPRGILKAFPKRQKIHADASSKVLAKIPRREEGEEAEEWLSSLRAHVVRTGIGRARAELFEKQIVQHGGQLCPAQGPGVTHIVVDEGMDYERALRLLRLPQLPPGAQLVKSAWLSLCLQERRLVDVAGFSIFIPSRYLDHPQPSKAEQDASIPPGTHEALLQTALSPPPPPTRPVSPPQKAKEAPNTQAQPISDDEASDGEETQVSAADLEALISGHYPTSLEGDCEPSPAPAVLDKWVCAQPSSQKATNHNLHITEKLEVLAKAYSVQGDKWRALGYAKAINALKSFHKPVTSYQEACSIPGIGKRMAEKIIEILESGHLRKLDHISESVPVLELFSNIWGAGTKTAQMWYQQGFRSLEDIRSQASLTTQQAIGLKHYSDFLERMPREEATEIEQTVQKAAQAFNSGLLCVACGSYRRGKATCGDVDVLITHPDGRSHRGIFSRLLDSLRQEGFLTDDLVSQEENGQQQKYLGVCRLPGPGRRHRRLDIIVVPYSEFACALLYFTGSAHFNRSMRALAKTKGMSLSEHALSTAVVRNTHGCKVGPGRVLPTPTEKDVFRLLGLPYREPAERDW

SEQ ID NO: 4431 - protein, 494 aa, synthetic construct
MLPKRRRARVGSPSGDAASSTPPSTRFPGVAIYLVEPRMGRSRRAFLTGLARSKGFRVLDACSSEATHVVMEETSAEEAVSWQERRMAAAPPGCTPPALLDISWLTESLGAGQPVPVECRHRLEVAGPRKGPLSPAWMPAYACQRPTPLTHHNTGLSEALEILAEAAGFEGSEGRLLTFCRAASVLKALPSPVTTLSQLQGLPHFGEHSSRVVQELLEHGVCEEVERVRRSERYQTMKLFTQIFGVGVKTADRWYREGLRTLDDLREQPQKLTQQQKAGLQHHQDLSTPVLRSDVDALQQVVEEAVGQALPGATVTLTGGFRRGKLQGHDVDFLITHPKEGQEAGLLPRVMCRLQDQGLILYHQHQHSCCESPTRLAQQSHMDAFERSFCIFRLPQPPGAAVGGSTRPCPSWKAVRVDLVVAPVSQFPFALLGWTGSKLFQRELRRFSRKEKGLWLNSHGLFDPEQKTFFQAASEEDIFRHLGLEYLPPEQRNA

SEQ ID NO: 4432 - protein, 509 aa, synthetic construct
MDPPRASHLSPRKKRPRQTGALMASSPQDIKFQDLVVFILEKKMGTTRRAFLMELARRKGFRVENELSDSVTHIVAENNSGSDVLEWLQAQKVQVSSQPELLDVSWLIECIRAGKPVEMTGKHQLVVRRDYSDSTNPGPPKTPPIAVQKISQYACQRRTTLNNCNQIFTDAFDILAENCEFRENEDSCVTFMRAASVLKSLPFTIISMKDTEGIPCLGSKVKGIIEEIIEDGESSEVKAVLNDERYQSFKLFTSVFGVGLKTSEKWFRMGFRTLSKVRSDKSLKFTRMQKAGFLYYEDLVSCVTRAEAEAVSVLVKEAVWAFLPDAFVTMTGGFRRGKKMGHDVDFLITSPGSTEDEEQLLQKVMNLWEKKGLLLYYDLVESTFEKLRLPSRKVDALDHFQKCFLIFKLPRQRVDSDQSSWQEGKTWKAIRVDLVLCPYERRAFALLGWTGSRQFERDLRRYATHERKMILDNHALYDKTKRIFLKAESEEEIFAHLGLDYIEPWERNA

SEQ ID NO: 4433 - protein, 2590 aa, synthetic construct
MNLLRRSGKRRRSESGSDSFSGSGGDSSASPQFLSGSVLSPPPGLGRCLKAAAAGECKPTVPDYERDKLLLANWGLPKAVLEKYHSFGVKKMFEWQAECLLLGQVLEGKNLVYSAPTSAGKTLVAELLILKRVLEMRKKALFILPFVSVAKEKKYYLQSLFQEVGIKVDGYMGSTSPSRHFSSLDIAVCTIERANGLINRLIEENKMDLLGMVVVDELHMLGDSHRGYLLELLLTKICYITRKSASCQADLASSLSNAVQIVGMSATLPNLELVASWLNAELYHTDFRPVPLLESVKVGNSIYDSSMKLVREFEPMLQVKGDEDHVVSLCYETICDNHSVLLFCPSKKWCEKLADIIAREFYNLHHQAEGLVKPSECPPVILEQKELLEVMDQLRRLPSGLDSVLQKTVPWGVAFHHAGLTFEERDIIEGAFRQGLIRVLAATSTLSSGVNLPARRVIIRTPIFGGRPLDILTYKQMVGRAGRKGVDTVGESILICKNSEKSKGIALLQGSLKPVRSCLQRREGEEVTGSMIRAILEIIVGGVASTSQDMHTYAACTFLAASMKEGKQGIQRNQESVQLGAIEACVMWLLENEFIQSTEASDGTEGKVYHPTHLGSATLSSSLSPADTLDIFADLQRAMKGFVLENDLHILYLVTPMFEDWTTIDWYRFFCLWEKLPTSMKRVAELVGVEEGFLARCVKGKVVARTERQHRQMAIHKRFFTSLVLLDLISEVPLREINQKYGCNRGQIQSLQQSAAVYAGMITVFSNRLGWHNMELLLSQFQKRLTFGIQRELCDLVRVSLLNAQRARVLYASGFHTVADLARANIVEVEVILKNAVPFKSARKAVDEEEEAVEERRNMRTIWVTGRKGLTEREAAALIVEEARMILQQDLVEMGVQWNPCALLHSSTCSLTHSESEVKEHTFISQTKSSYKKLTSKNKSNTIFSDSYIKHSPNIVQDLNKSREHTSSFNCNFQNGNQEHQTCSIFRARKRASLDINKEKPGASQNEGKTSDKKVVQTFSQKTKKAPLNFNSEKMSRSFRSWKRRKHLKRSRDSSPLKDSGACRIHLQGQTLSNPSLCEDPFTLDEKKTEFRNSGPFAKNVSLSGKEKDNKTSFPLQIKQNCSWNITLTNDNFVEHIVTGSQSKNVTCQATSVVSEKGRGVAVEAEKINEVLIQNGSKNQNVYMKHHDIHPINQYLRKQSHEQTSTITKQKNIIERQMPCEAVSSYINRDSNVTINCERIKLNTEENKPSHFQALGDDISRTVIPSEVLPSAGAFSKSEGQHENFLNISRLQEKTGTYTTNKTKNNHVSDLGLVLCDFEDSFYLDTQSEKIIQQMATENAKLGAKDTNLAAGIMQKSLVQQNSMNSFQKECHIPFPAEQHPLGATKIDHLDLKTVGTMKQSSDSHGVDILTPESPIFHSPILLEENGLFLKKNEVSVTDSQLNSFLQGYQTQETVKPVILLIPQKRTPTGVEGECLPVPETSLNMSDSLLFDSFSDDYLVKEQLPDMQMKEPLPSEVTSNHFSDSLCLQEDLIKKSNVNENQDTHQQLTCSNDESIIFSEMDSVQMVEALDNVDIFPVQEKNHTVVSPRALELSDPVLDEHHQGDQDGGDQDERAEKSKLTGTRQNHSFIWSGASFDLSPGLQRILDKVSSPLENEKLKSMTINFSSLNRKNTELNEEQEVISNLETKQVQGISFSSNNEVKSKIEMLENNANHDETSSLLPRKESNIVDDNGLIPPTPIPTSASKLTFPGILETPVNPWKTNNVLQPGESYLFGSPSDIKNHDLSPGSRNGFKDNSPISDTSFSLQLSQDGLQLTPASSSSESLSIIDVASDQNLFQTFIKEWRCKKRFSISLACEKIRSLTSSKTATIGSRFKQASSPQEIPIRDDGFPIKGCDDTLVVGLAVCWGGRDAYYFSLQKEQKHSEISASLVPPSLDPSLTLKDRMWYLQSCLRKESDKECSVVIYDFIQSYKILLLSCGISLEQSYEDPKVACWLLDPDSQEPTLHSIVTSFLPHELPLLEGMETSQGIQSLGLNAGSEHSGRYRASVESILIFNSMNQLNSLLQKENLQDVFRKVEMPSQYCLALLELNGIGFSTAECESQKHIMQAKLDAIETQAYQLAGHSFSFTSSDDIAEVLFLELKLPPNREMKNQGSKKTLGSTRRGIDNGRKLRLGRQFSTSKDVLNKLKALHPLPGLILEWRRITNAITKVVFPLQREKCLNPFLGMERIYPVSQSHTATGRITFTEPNIQNVPRDFEIKMPTLVGESPPSQAVGKGLLPMGRGKYKKGFSVNPRCQAQMEERAADRGMPFSISMRHAFVPFPGGSILAADYSQLELRILAHLSHDRRLIQVLNTGADVFRSIAAEWKMIEPESVGDDLRQQAKQICYGIIYGMGAKSLGEQMGIKENDAACYIDSFKSRYTGINQFMTETVKNCKRDGFVQTILGRRRYLPGIKDNNPYRKAHAERQAINTIVQGSAADIVKIATVNIQKQLETFHSTFKSHGHREGMLQSDQTGLSRKRKLQGMFCPIRGGFFILQLHDELLYEVAEEDVVQVAQIVKNEMESAVKLSVKLKVKVKIGASWGELKDFDV

SEQ ID NO: 4434 - protein, 900 aa, synthetic construct
MENYEALVGFDLCNTPLSSVAQKIMSAMHSGDLVDSKTWGKSTETMEVINKSSVKYSVQLEDRKTQSPEKKDLKSLRSQTSRGSAKLSPQSFSVRLTDQLSADQKQKSISSLTLSSCLIPQYNQEASVLQKKGHKRKHFLMENINNENKGSINLKRKHITYNNLSEKTSKQMALEEDTDDAEGYLNSGNSGALKKHFCDIRHLDDWAKSQLIEMLKQAAALVITVMYTDGSTQLGADQTPVSSVRGIVVLVKRQAEGGHGCPDAPACGPVLEGFVSDDPCIYIQIEHSAIWDQEQEAHQQFARNVLFQTMKCKCPVICFNAKDFVRIVLQFFGNDGSWKHVADFIGLDPRIAAWLIDPSDATPSFEDLVEKYCEKSITVKVNSTYGNSSRNIVNQNVRENLKTLYRLTMDLCSKLKDYGLWQLFRTLELPLIPILAVMESHAIQVNKEEMEKTSALLGARLKELEQEAHFVAGERFLITSNNQLREILFGKLKLHLLSQRNSLPRTGLQKYPSTSEAVLNALRDLHPLPKIILEYRQVHKIKSTFVDGLLACMKKGSISSTWNQTGTVTGRLSAKHPNIQGISKHPIQITTPKNFKGKEDKILTISPRAMFVSSKGHTFLAADFSQIELRILTHLSGDPELLKLFQESERDDVFSTLTSQWKDVPVEQVTHADREQTKKVVYAVVYGAGKERLAACLGVPIQEAAQFLESFLQKYKKIKDFARAAIAQCHQTGCVVSIMGRRRPLPRIHAHDQQLRAQAERQAVNFVVQGSAADLCKLAMIHVFTAVAASHTLTARLVAQIHDELLFEVEDPQIPECAALVRRTMESLEQVQALELQLQVPLKVSLSAGRSWGHLVPLQEAWGPPPGPCRTESPSNSLAAPGSPASTQPPPLHFSPSFCL

SEQ ID NO: 4435 - protein, 4 aa, unidentified
YADD

SEQ ID NO: 4436 - protein, 4 aa, unidentified
YMDD

SEQ ID NO: 4437 - protein, 4 aa, unidentified
YVDD

SEQ ID NO: 4438 - protein, 673 aa, Reticuloendotheliosis virus
TAPLEEEYRLFLEAPIQNVTLLEQWKREIPKVWAEINPPGLASTQAPIHVQLLSTALPVRVRQYPITLEAKRSLRETIRKFRAAGILRPVHSPWNTPLLPVRKSGTSEYRMVQDLREVNKRVETIHPTVPNPYTLLSLLPPDRIWYSVLDLKDAFFCIPLAPESQLIFAFEWADAEEGESGQLTWTRLPQGFKNSPTLFDEALNRDLQGFRLDHPSVSLLQYVDDLLIAADTQAACLSATRDLLMTLAELGYRVSGKKAQLCQEEVTYLGFKIHKGSRSLSNSRTQAILQIPVPKTKRQVREFLGTIGYCRLWIPGFAELAQPLYAATRGGNDPLVWGEKEEEAFQSLKLALTQPPALALPSLDKPFQLFVEETSGAAKGVLTQALGPWKRPVAYLSKRLDPVAAGWPRCLRAIAAAALLTREASKLTFGQDIEITSSHNLESLLRSPPDKWLTNARITQYQVLLLDPPRVRFKQTAALNPATLLPETDDTLPIHHCLDTLDSLTSTRPDLTDQPLAQAEATLFTDGSSYIRDGKRYAGAAVVTLDSVIWAEPLPIGTSAQKAELIALTKALEWSKDKSVNIYTDSRYAFATLHVHGMIYRERGLLTAGGKAIKNAPEILALLTAVWLPKRVAVMHCKGHQKDDAPTSTGNRRADEVAREVAIRPLSTQATIS

SEQ ID NO: 4439 - protein, 673 aa, synthetic construct
TAPLEEEYRLFLEAPIQNVTLLEQWKREIPKVWAEINPPGLASTQAPIHVQLLSTALPVRVRQYPITLEAKRSLRETIRKFRAAGILRPVHSPWNTPLLPVRKSGTSEYRMVQDLREVNKRVETIHPTVPNPYTLLSLLPPDRIWYSVLDLKDAFFCIPLAPESQLIFAFEWADAEEGESGQLTWTRLPQGFKNSPTLFNEALNRDLQGFRLDHPSVSLLQYVDDLLIAADTQAACLSATRDLLMTLAELGYRVSGKKAQLCQEEVTYLGFKIHKGSRSLSNSRTQAILQIPVPKTKRQVREFLGTIGYCRLWIPGFAELAQPLYAATRPGNDPLVWGEKEEEAFQSLKLALTQPPALALPSLDKPFQLFVEETSGAAKGVLTQALGPWKRPVAYLSKRLDPVAAGWPRCLRAIAAAALLTREASKLTFGQDIEITSSHNLESLLRSPPDKWLTNARITQYQVLLLDPPRVRFKQTAALNPATLLPETDDTLPIHHCLDTLDSLTSTRPDLTDQPLAQAEATLFTDGSSYIRDGKRYAGAAVVTLDSVIWAEPLPIGTSAQKAELIALTKALEWSKDKSVNIYTDSRYAFATLHVHGMIYRERGWLTAGGKAIKNAPEILALLTAVWLPKRVAVMHCKGHQKDDAPTSTGNRRADEVAREVAIRPLSTQATIS

SEQ ID NO: 4440 - protein, 673 aa, synthetic construct
TAPLEEEYRLFLEAPIQNVTLLEQWKREIPKVWAEINPPGLASTQAPIHVQLLSTALPVRVRQYPITLEAKRSLRETIRKFRAAGILRPVHSPWNTPLLPVRKSGTSEYRMVQDLREVNKRVETIHPTVPNPYTLLSLLPPDRIWYSVLDLKDAFFCIPLAPESQLIFAFEWADAEEGESGQLTWTRLPQGFKNSPTLFNEALNRDLQGFRLDHPSVSLLQYVDDLLIAADTQAACLSATRDLLMTLAELGYRVSGKKAQLCQEEVTYLGFKIHKGSRSLSNSRTQAILQIPVPKTKRQVREFLGKIGYCRLFIPGFAELAQPLYAATRPGNDPLVWGEKEEEAFQSLKLALTQPPALALPSLDKPFQLFVEETSGAAKGVLTQALGPWKRPVAYLSKRLDPVAAGWPRCLRAIAAAALLTREASKLTFGQDIEITSSHNLESLLRSPPDKWLTNARITQYQVLLLDPPRVRFKQTAALNPATLLPETDDTLPIHHCLDTLDSLTSTRPDLTDQPLAQAEATLFTDGSSYIRDGKRYAGAAVVTLDSVIWAEPLPIGTSAQKAELIALTKALEWSKDKSVNIYTDSRYAFATLHVHGMIYRERGWLTAGGKAIKNAPEILALLTAVWLPKRVAVMHCKGHQKDDAPTSTGNRRADEVAREVAIRPLSTQATIS

SEQ ID NO: 4441 - protein, 677 aa, Baboon endogenous virus
TVSLQDEHRLFDIPVTTSLPDVWLQDFPQAWAETGGLGRAKCQAPIIIDLKPTAVPVSIKQYPMSLEAHMGIRQHIIKFLELGVLRPCRSPWNTPLLPVKKPGTQDYRPVQDLREINKRTVDIHPTVPNPYNLLSTLKPDYSWYTVLDLKDAFFCLPLAPQSQELFAFEWKDPERGISGQLTWTRLPQGFKNSPTLFDEALHRDLTDFRTQHPEVTLLQYVDDLLLAAPTKKACTQGTRHLLQELGEKGYRASAKKAQICQTKVTYLGYILSEGKRWLTPGRIETVARIPPPRNPREVREFLGTAGFCRLWIPGFAELAAPLYALTKESTPFTWQTEHQLAFEALKKALLSAPALGLPDTSKPFTLFLDERQGIAKGVLTQKLGPWKRPVAYLSKKLDPVAAGWPPCLRIMAATAMLVKDSAKLTLGQPLTVITPHTLEAIVRQPPDRWITNARLTHYQALLLDTDRVQFGPPVTLNPATLLPVPENQPSPHDCRQVLAETHGTREDLKDQELPDADHTWYTDGSSYLDSGTRRAGAAVVDGHNTIWAQSLPPGTSAQKAELIALTKALELSKGKKANIYTDSRYAFATAHTHGSIYERRGLLTSEGKEIKNKAEIIALLKALFLPQEVAIIHCPGHQKGQDPVAVGNRQADRVARQAAMAEVLTLATEPDNTSHIT

SEQ ID NO: 4442 - protein, 677 aa, synthetic construct
TVSLQDEHRLFDIPVTTSLPDVWLQDFPQAWAETGGLGRAKCQAPIIIDLKPTAVPVSIKQYPMSLEAHMGIRQHIIKFLELGVLRPCRSPWNTPLLPVKKPGTQDYRPVQDLREINKRTVDIHPTVPNPYNLLSTLKPDYSWYTVLDLKDAFFCLPLAPQSQELFAFEWKDPERGISGQLTWTRLPQGFKNSPTLFNEALHRDLTDFRTQHPEVTLLQYVDDLLLAAPTKKACTQGTRHLLQELGEKGYRASAKKAQICQTKVTYLGYILSEGKRWLTPGRIETVARIPPPRNPREVREFLGTAGFCRLWIPGFAELAAPLYALTKPSTPFTWQTEHQLAFEALKKALLSAPALGLPDTSKPFTLFLDERQGIAKGVLTQKLGPWKRPVAYLSKKLDPVAAGWPPCLRIMAATAMLVKDSAKLTLGQPLTVITPHTLEAIVRQPPDRWITNARLTHYQALLLDTDRVQFGPPVTLNPATLLPVPENQPSPHDCRQVLAETHGTREDLKDQELPDADHTWYTDGSSYLDSGTRRAGAAVVDGHNTIWAQSLPPGTSAQKAELIALTKALELSKGKKANIYTDSRYAFATAHTHGSIYERRGWLTSEGKEIKNKAEIIALLKALFLPQEVAIIHCPGHQKGQDPVAVGNRQADRVARQAAMAEVLTLATEPDNTSHIT

SEQ ID NO: 4443 - protein, 677 aa, synthetic construct
TVSLQDEHRLFDIPVTTSLPDVWLQDFPQAWAETGGLGRAKCQAPIIIDLKPTAVPVSIKQYPMSLEAHMGIRQHIIKFLELGVLRPCRSPWNTPLLPVKKPGTQDYRPVQDLREINKRTVDIHPTVPNPYNLLSTLKPDYSWYTVLDLKDAFFCLPLAPQSQELFAFEWKDPERGISGQLTWTRLPQGFKNSPTLFNEALHRDLTDFRTQHPEVTLLQYVDDLLLAAPTKKACTQGTRHLLQELGEKGYRASAKKAQICQTKVTYLGYILSEGKRWLTPGRIETVARIPPPRNPREVREFLGKAGFCRLFIPGFAELAAPLYALTKPSTPFTWQTEHQLAFEALKKALLSAPALGLPDTSKPFTLFLDERQGIAKGVLTQKLGPWKRPVAYLSKKLDPVAAGWPPCLRIMAATAMLVKDSAKLTLGQPLTVITPHTLEAIVRQPPDRWITNARLTHYQALLLDTDRVQFGPPVTLNPATLLPVPENQPSPHDCRQVLAETHGTREDLKDQELPDADHTWYTDGSSYLDSGTRRAGAAVVDGHNTIWAQSLPPGTSAQKAELIALTKALELSKGKKANIYTDSRYAFATAHTHGSIYERRGWLTSEGKEIKNKAEIIALLKALFLPQEVAIIHCPGHQKGQDPVAVGNRQADRVARQAAMAEVLTLATEPDNTSHIT

SEQ ID NO: 4444 - protein, 576 aa, Bovine leukemia virus
GVLDAPPSHIGLEHLPPPPEVPQFPLNLERLQALQDLVHRSLEAGYISPWDGPGNNPVFPVRKPNGAWRFVHDLRVTNALTKPIPALSPGPPDLTAIPTHLPHIICLDLKDAFFQIPVEDRFRSYFAFTLPTPGGLQPHRRFAWRVLPQGFINSPALFERALQEPLRQVSAAFSQSLLVSYMDDILYVSPTEEQRLQCYQTMAAHLRDLGFQVASEKTRQTPSPVPFLGQMVHERMVTYQSLPTLQISSPISLHQLQTVLGDLQWVSRGTPTTRRPLQLLYSSLKGIDDPRAIIHLSPEQQQGIAELRQALSHNARSRYNEQEPLLAYVHLTRAGSTLVLFQKGAQFPLAYFQTPLTDNQASPWGLLLLLGCQYLQAQALSSYAKTILKYYHNLPKTSLDNWIQSSEDPRVQELLQLWPQISSQGIQPPGPWKTLVTRAEVFLTPQFSPEPIPAALCLFSDGAARRGAYCLWKDHLLDFQAVPAPESAQKGELAGLLAGLAAAPPEPLNIWVDSKYLYSLLRTLVLGAWLQPDPVPSYALLYKSLLRHPAIFVGHVRSHSSASHPIASLNNYVDQL

SEQ ID NO: 4445 - protein, 576 aa, synthetic construct
GVLDAPPSHIGLEHLPPPPEVPQFPLNLERLQALQDLVHRSLEAGYISPWDGPGNNPVFPVRKPNGAWRFVHDLRVTNALTKPIPALSPGPPDLTAIPTHLPHIICLDLKDAFFQIPVEDRFRSYFAFTLPTPGGLQPHRRFAWRVLPQGFINSPALFQRALQEPLRQVSAAFSQSLLVSYMDDILYVSPTEEQRLQCYQTMAAHLRDLGFQVASEKTRQTPSPVPFLGQMVHERMVTYQSLPTLQISSPISLHQLQTVLGDLQWVSRGTPTTRRPLQLLYSSLKPIDDPRAIIHLSPEQQQGIAELRQALSHNARSRYNEQEPLLAYVHLTRAGSTLVLFQKGAQFPLAYFQTPLTDNQASPWGLLLLLGCQYLQAQALSSYAKTILKYYHNLPKTSLDNWIQSSEDPRVQELLQLWPQISSQGIQPPGPWKTLVTRAEVFLTPQFSPEPIPAALCLFSDGAARRGAYCLWKDHLLDFQAVPAPESAQKGELAGLLAGLAAAPPEPLNIWVDSKYLYSLLRTLVLGAWLQPDPVPSYALLYKSLLRHPAIFVGHVRSHSSASHPIASLNNYVDQL

SEQ ID NO: 4446 - protein, 576 aa, Bovine leukemia virus
GVLDTPPSHIGLEHLPPPPEVPQFPLNLERLQALQDLVHRSLEAGYISPWDGPGNNPVFPVRKPNGAWRFVHDLRATNALTKPIPALSPGPPDLTAIPTHPPHIICLDLKDAFFQIPVEDRFRFYLSFTLPSPGGLQPHRRFAWRVLPQGFINSPALFERALQEPLRQVSAAFSQSLLVSYMDDILYASPTEEQRSQCYQALAARLRDLGFQVASEKTSQTPSPVPFLGQMVHEQIVTYQSLPTLQISSPISLHQLQAVLGDLQWVSRGTPTTRRPLQLLYSSLKRHHDPRAIIQLSPEQLQGIAELRQALSHNARSRYNEQEPLLAYVHLTRAGSTLVLFQKGAQFPLAYFQTPLTDNQASPWGLLLLLGCQYLQTQALSSYAKPILKYYHNLPKTSLDNWIQSSEDPRVQELLQLWPQISSQGIQPPGPWKTLITRAEVFLTPQFSPDPIPAALCLFSDGATGRGAYCLWKDHLLDFQAVPAPESAQKGELAGLLAGLAAAPPEPVNIWVDSKYLYSLLRTLVLGAWLQPDPVPSYALLYKSLLRHPAIVVGHVRSHSSASHPIASLNNYVDQL

SEQ ID NO: 4447 - protein, 576 aa, synthetic construct
GVLDTPPSHIGLEHLPPPPEVPQFPLNLERLQALQDLVHRSLEAGYISPWDGPGNNPVFPVRKPNGAWRFVHDLRATNALTKPIPALSPGPPDLTAIPTHPPHIICLDLKDAFFQIPVEDRFRFYLSFTLPSPGGLQPHRRFAWRVLPQGFINSPALFNRALQEPLRQVSAAFSQSLLVSYMDDILYASPTEEQRSQCYQALAARLRDLGFQVASEKTSQTPSPVPFLGQMVHEQIVTYQSLPTLQISSPISLHQLQAVLGDLQWVSRGTPTTRRPLQLLYSSLKRHHDPRAIIQLSPEQLQGIAELRQALSHNARSRYNEQEPLLAYVHLTRAGSTLVLFQKGAQFPLAYFQTPLTDNQASPWGLLLLLGCQYLQTQALSSYAKPILKYYHNLPKTSLDNWIQSSEDPRVQELLQLWPQISSQGIQPPGPWKTLITRAEVFLTPQFSPDPIPAALCLFSDGATGRGAYCLWKDHLLDFQAVPAPESAQKGELAGLLAGLAAAPPEPVNIWVDSKYLYSLLRTWVLGAWLQPDPVPSYALLYKSLLRHPAIVVGHVRSHSSASHPIASLNNYVDQL

SEQ ID NO: 4448 - protein, 576 aa, synthetic construct
GVLDTPPSHIGLEHLPPPPEVPQFPLNLERLQALQDLVHRSLEAGYISPWDGPGNNPVFPVRKPNGAWRFVHDLRATNALTKPIPALSPGPPDLTAPPTHPPHIICLDLKDAFFQIPVEDRFRFYLSFTLPSPGGLQPHRRFAWRVLPQGFINSPALFQRALQEPLRQVSAAFSQSLLVSYMDDILYASPTEEQRSQCYQALAARLRDLGFQVASEKTSQTPSPVPFLGQMVHEQIVTYQSLPTLQISSPISLHQLQAVLGDLQWVSRGTPTTRRPLQLLYSSLKRHHDPRAIIQLSPEQLQGIAELRQALSHNARSRYNEQEPLLAYVHLTRAGSTLVLFQKGAQFPLAYFQTPLTDNQASPWGLLLLLGCQYLQTQALSSYAKPILKYYHNLPKTSLDNWIQSSEDPRVQELLQLWPQISSQGIQPPGPWKTLITRAEVFLTPQFSPDPIPAALCLFSDGATGRGAYCLWKDHLLDFQAVPAPESAQKGELAGLLAGLAAAPPEPVNIWVDSKYLYSLLRTWVLGAWLQPDPVPSYALLYKSLLRHPAIVVGHVRSHSSASHPIASLNNYVDQL

SEQ ID NO: 4449 - protein, 748 aa, Feline foamy virus
MDLLKPLTVERKGVKIKGYWNSQADITCVPKDLLQGEEPVRQQNVTTIHGTQEGDVYYVNLKIDGRRINTEVIGTTLDYAIITPGDVPWILKKPLELTIKLDLEEQQGTLLNNSILSKKGKEELKQLFEKYSALWQSWENQVGHRRIRPHKIATGTVKPTPQKQYHINPKAKPDIQIVINDLLKQGVLIQKESTMNTPVYPVPKPNGRWRMVLDYRAVNKVTPLIAVQNQHSYGILGSLFKGRYKTTIDLSNGFWAHPIVPEDYWITAFTWQGKQYCWTVLPQGFLNSPGLFTGDVVDLLQGIPNVEVYVDDVYISHDSEKEHLEYLDILFNRLKEAGYIISLKKSNIANSIVDFLGFQITNEGRGLTDTFKEKLENITAPTTLKQLQSILGLLNFARNFIPDFTELIAPLYALIPKSTKNYVPWQIEHSTTLETLITKLNGAEYLQGRKGDKTLIMKVNASYTTGYIRYYNEGEKKPISYVSIVFSKTELKFTELEKLLTTVHKGLLKALDLSMGQNIHVYSPIVSMQNIQKTPQTAKKALASRWLSWLSYLEDPRIRFFYDPQMPALKDLPAVDTGKDNKKHPSNFQHIFYTDGSAITSPTKEGHLNAGMGIVYFINKDGNLQKQQEWSISLGNHTAQFAEIAAFEFALKKCLPLGGNILVVTDSNYVAKAYNEELDVWASNGFVNNRKKPLKHISKWKSVADLKRLRPDVVVTHEPGHQKLDSSPHAYGNNLADQLATQASFKVH

SEQ ID NO: 4450 - protein, 748 aa, synthetic construct
MDLLKPLTVERKGVKIKGYWNSQADITCVPKDLLQGEEPVRQQNVTTIHGTQEGDVYYVNLKIDGRRINTEVIGTTLDYAIITPGDVPWILKKPLELTIKLDLEEQQGTLLNNSILSKKGKEELKQLFEKYSALWQSWENQVGHRRIRPHKIATGTVKPTPQKQYHINPKAKPDIQIVINDLLKQGVLIQKESTMNTPVYPVPKPNGRWRMVLDYRAVNKVTPLIAVQNQHSYGILGSLFKGRYKTTIDLSNGFWAHPIVPEDYWITAFTWQGKQYCWTVLPQGFLNSPGLFNGDVVDLLQGIPNVEVYVDDVYISHDSEKEHLEYLDILFNRLKEAGYIISLKKSNIANSIVDFLGFQITNEGRGLTDTFKEKLENITAPTTLKQLQSILGLLNFARNFIPDFTELIAPLYALIPKSPKNYVPWQIEHSTTLETLITKLNGAEYLQGRKGDKTLIMKVNASYTTGYIRYYNEGEKKPISYVSIVFSKTELKFTELEKLLTTVHKGLLKALDLSMGQNIHVYSPIVSMQNIQKTPQTAKKALASRWLSWLSYLEDPRIRFFYDPQMPALKDLPAVDTGKDNKKHPSNFQHIFYTDGSAITSPTKEGHLNAGMGIVYFINKDGNLQKQQEWSISLGNHTAQFAEIAAFEFALKKCLPLGGNILVVTDSNYVAKAYNEELDVWASNGFVNNRKKPLKHISKWKSVADLKRLRPDVVVTHEPGHQKLDSSPHAYGNNLADQLATQASFKVH

SEQ ID NO: 4451 - protein, 748 aa, synthetic construct
MDLLKPLTVERKGVKIKGYWNSQADITCVPKDLLQGEEPVRQQNVTTIHGTQEGDVYYVNLKIDGRRINTEVIGTTLDYAIITPGDVPWILKKPLELTIKLDLEEQQGTLLNNSILSKKGKEELKQLFEKYSALWQSWENQVGHRRIRPHKIATGTVKPTPQKQYHINPKAKPDIQIVINDLLKQGVLIQKESTMNTPVYPVPKPNGRWRMVLDYRAVNKVTPLIAVQNQHSYGILGSLFKGRYKTTIDLSNGFWAHPIVPEDYWITAFTWQGKQYCWTVLPQGFLNSPGLFNGDVVDLLQGIPNVEVYVDDVYISHDSEKEHLEYLDILFNRLKEAGYIISLKKSNIANSIVDFLGFQITNEGRGLTDTFKEKLENITAPTTLKQLQSILGKLNFARNFIPDFTELIAPLYALIPKSPKNYVPWQIEHSTTLETLITKLNGAEYLQGRKGDKTLIMKVNASYTTGYIRYYNEGEKKPISYVSIVFSKTELKFTELEKLLTTVHKGLLKALDLSMGQNIHVYSPIVSMQNIQKTPQTAKKALASRWLSWLSYLEDPRIRFFYDPQMPALKDLPAVDTGKDNKKHPSNFQHIFYTDGSAITSPTKEGHLNAGMGIVYFINKDGNLQKQQEWSISLGNHTAQFAEIAAFEFALKKCLPLGGNILVVTDSNYVAKAYNEELDVWASNGFVNNRKKPLKHISKWKSVADLKRLRPDVVVTHEPGHQKLDSSPHAYGNNLADQLATQASFKVH

SEQ ID NO: 4452 - protein, 662 aa, Feline foamy virus
VPWILKKPLELTIKLDLEEQQGTLLNNSILSKKGKEELKQLFEKYSALWQSWENQVGHRRIRPHKIATGTVKPTPQKQYHINPKAKPDIQIVINDLLKQGVLIQKESTMNTPVYPVPKPNGRWRMVLDYRAVNKVTPLIAVQNQHSYGILGSLFKGRYKTTIDLSNGFWAHPIVPEDYWITAFTWQGKQYCWTVLPQGFLNSPGLFTGDVVDLLQGIPNVEVYVDDVYISHDSEKEHLEYLDILFNRLKEAGYIISLKKSNIANSIVDFLGFQITNEGRGLTDTFKEKLENITAPTTLKQLQSILGLLNFARNFIPDFTELIAPLYALIPKSTKNYVPWQIEHSTTLETLITKLNGAEYLQGRKGDKTLIMKVNASYTTGYIRYYNEGEKKPISYVSIVFSKTELKFTELEKLLTTVHKGLLKALDLSMGQNIHVYSPIVSMQNIQKTPQTAKKALASRWLSWLSYLEDPRIRFFYDPQMPALKDLPAVDTGKDNKKHPSNFQHIFYTDGSAITSPTKEGHLNAGMGIVYFINKDGNLQKQQEWSISLGNHTAQFAEIAAFEFALKKCLPLGGNILVVTDSNYVAKAYNEELDVWASNGFVNNRKKPLKHISKWKSVADLKRLRPDVVVTHEPGHQKLDSSPHAYGNNLADQLATQASFKVH

SEQ ID NO: 4453 - protein, 662 aa, synthetic construct
VPWILKKPLELTIKLDLEEQQGTLLNNSILSKKGKEELKQLFEKYSALWQSWENQVGHRRIRPHKIATGTVKPTPQKQYHINPKAKPDIQIVINDLLKQGVLIQKESTMNTPVYPVPKPNGRWRMVLDYRAVNKVTPLIAVQNQHSYGILGSLFKGRYKTTIDLSNGFWAHPIVPEDYWITAFTWQGKQYCWTVLPQGFLNSPGLFNGDVVDLLQGIPNVEVYVDDVYISHDSEKEHLEYLDILFNRLKEAGYIISLKKSNIANSIVDFLGFQITNEGRGLTDTFKEKLENITAPTTLKQLQSILGLLNFARNFIPDFTELIAPLYALIPKSPKNYVPWQIEHSTTLETLITKLNGAEYLQGRKGDKTLIMKVNASYTTGYIRYYNEGEKKPISYVSIVFSKTELKFTELEKLLTTVHKGLLKALDLSMGQNIHVYSPIVSMQNIQKTPQTAKKALASRWLSWLSYLEDPRIRFFYDPQMPALKDLPAVDTGKDNKKHPSNFQHIFYTDGSAITSPTKEGHLNAGMGIVYFINKDGNLQKQQEWSISLGNHTAQFAEIAAFEFALKKCLPLGGNILVVTDSNYVAKAYNEELDVWASNGFVNNRKKPLKHISKWKSVADLKRLRPDVVVTHEPGHQKLDSSPHAYGNNLADQLATQASFKVH

SEQ ID NO: 4454 - protein, 662 aa, synthetic construct
VPWILKKPLELTIKLDLEEQQGTLLNNSILSKKGKEELKQLFEKYSALWQSWENQVGHRRIRPHKIATGTVKPTPQKQYHINPKAKPDIQIVINDLLKQGVLIQKESTMNTPVYPVPKPNGRWRMVLDYRAVNKVTPLIAVQNQHSYGILGSLFKGRYKTTIDLSNGFWAHPIVPEDYWITAFTWQGKQYCWTVLPQGFLNSPGLFNGDVVDLLQGIPNVEVYVDDVYISHDSEKEHLEYLDILFNRLKEAGYIISLKKSNIANSIVDFLGFQITNEGRGLTDTFKEKLENITAPTTLKQLQSILGKLNFARNFIPDFTELIAPLYALIPKSPKNYVPWQIEHSTTLETLITKLNGAEYLQGRKGDKTLIMKVNASYTTGYIRYYNEGEKKPISYVSIVFSKTELKFTELEKLLTTVHKGLLKALDLSMGQNIHVYSPIVSMQNIQKTPQTAKKALASRWLSWLSYLEDPRIRFFYDPQMPALKDLPAVDTGKDNKKHPSNFQHIFYTDGSAITSPTKEGHLNAGMGIVYFINKDGNLQKQQEWSISLGNHTAQFAEIAAFEFALKKCLPLGGNILVVTDSNYVAKAYNEELDVWASNGFVNNRKKPLKHISKWKSVADLKRLRPDVVVTHEPGHQKLDSSPHAYGNNLADQLATQASFKVH

SEQ ID NO: 4455 - protein, 670 aa, Feline leukemia virus
TLQLEEEYRLFEPESTQKQEMDIWLKNFPQAWAETGGMGTAHCQAPVLIQLKATATPISIRQYPMPHEAYQGIKPHIRRMLDQGILKPCQSPWNTPLLPVKKPGTEDYRPVQDLREVNKRVEDIHPTVPNPYNLLSTLPPSHPWYTVLDLKDAFFCLRLHSESQLLFAFEWRDPEIGLSGQLTWTRLPQGFKNSPTLFDEALHSDLADFRVRYPALVLLQYVDDLLLAAATRTECLEGTKALLETLGNKGYRASAKKAQICLQEVTYLGYSLKDGQRWLTKARKEAILSIPVPKNSRQVREFLGTAGYCRLWIPGFAELAAPLYPLTRPGTLFQWGTEQQLAFEDIKKALLSSPALGLPDITKPFELFIDENSGFAKGVLVQKLGPWKRPVAYLSKKLDTVASGWPPCLRMVAAIAILVKDAGKLTLGQPLTILTSHPVEALVRQPPNKWLSNARMTHYQAMLLDAERVHFGPTVSLNPATLLPLPSGGNHHDCLQILAETHGTRPDLTDQPLPDADLTWYTDGSSFIRNGEREAGAAVTTESEVIWAAPLPPGTSAQRAELIALTQALKMAEGKKLTVYTDSRYAFATTHVHGEIYRRRGLLTSEGKEIKNKNEILALLEALFLPKRLSIIHCPGHQKGDSPQAKGNRLADDTAKKAATETHSSLTVLP

SEQ ID NO: 4456 - protein, 670 aa, synthetic construct
TLQLEEEYRLFEPESTQKQEMDIWLKNFPQAWAETGGMGTAHCQAPVLIQLKATATPISIRQYPMPHEAYQGIKPHIRRMLDQGILKPCQSPWNTPLLPVKKPGTEDYRPVQDLREVNKRVEDIHPTVPNPYNLLSTLPPSHPWYTVLDLKDAFFCLRLHSESQLLFAFEWRDPEIGLSGQLTWTRLPQGFKNSPTLFNEALHSDLADFRVRYPALVLLQYVDDLLLAAATRTECLEGTKALLETLGNKGYRASAKKAQICLQEVTYLGYSLKDGQRWLTKARKEAILSIPVPKNSRQVREFLGTAGYCRLWIPGFAELAAPLYPLTRPGTLFQWGTEQQLAFEDIKKALLSSPALGLPDITKPFELFIDENSGFAKGVLVQKLGPWKRPVAYLSKKLDTVASGWPPCLRMVAAIAILVKDAGKLTLGQPLTILTSHPVEALVRQPPNKWLSNARMTHYQAMLLDAERVHFGPTVSLNPATLLPLPSGGNHHDCLQILAETHGTRPDLTDQPLPDADLTWYTDGSSFIRNGEREAGAAVTTESEVIWAAPLPPGTSAQRAELIALTQALKMAEGKKLTVYTDSRYAFATTHVHGEIYRRRGWLTSEGKEIKNKNEILALLEALFLPKRLSIIHCPGHQKGDSPQAKGNRLADDTAKKAATETHSSLTVLP

SEQ ID NO: 4457 - protein, 670 aa, synthetic construct
TLQLEEEYRLFEPESTQKQEMDIWLKNFPQAWAETGGMGTAHCQAPVLIQLKATATPISIRQYPMPHEAYQGIKPHIRRMLDQGILKPCQSPWNTPLLPVKKPGTEDYRPVQDLREVNKRVEDIHPTVPNPYNLLSTLPPSHPWYTVLDLKDAFFCLRLHSESQLLFAFEWRDPEIGLSGQLTWTRLPQGFKNSPTLFNEALHSDLADFRVRYPALVLLQYVDDLLLAAATRTECLEGTKALLETLGNKGYRASAKKAQICLQEVTYLGYSLKDGQRWLTKARKEAILSIPVPKNSRQVREFLGKAGYCRLFIPGFAELAAPLYPLTRPGTLFQWGTEQQLAFEDIKKALLSSPALGLPDITKPFELFIDENSGFAKGVLVQKLGPWKRPVAYLSKKLDTVASGWPPCLRMVAAIAILVKDAGKLTLGQPLTILTSHPVEALVRQPPNKWLSNARMTHYQAMLLDAERVHFGPTVSLNPATLLPLPSGGNHHDCLQILAETHGTRPDLTDQPLPDADLTWYTDGSSFIRNGEREAGAAVTTESEVIWAAPLPPGTSAQRAELIALTQALKMAEGKKLTVYTDSRYAFATTHVHGEIYRRRGWLTSEGKEIKNKNEILALLEALFLPKRLSIIHCPGHQKGDSPQAKGNRLADDTAKKAATETHSSLTVLP

SEQ ID NO: 4458 - protein, 751 aa, unidentified
MNPLQLLQPLPAEIKGTKLLAHWNSGATITCIPESFLEDEQPIKKTLIKTIHGEKQQNVYYVTFKVKGRKVEAEVIASPYEYILLSPTDVPWLTQQPLQLTILVPLQEYQEKILSKTALPEDQKQQLKTLFVKYDNLWQHWENQVGHRKIRPHNIATGDYPPRPQKQYPINPKAKPSIQIVIDDLLKQGVLTPQNSTMNTPVYPVPKPDGRWRMVLDYREVNKTIPLTAAQNQHSAGILATIVRQKYKTTLDLANGFWAHPITPESYWLTAFTWQGKQYCWTRLPQGFLNSPALFTADVVDLLKEIPNVQVYVDDIYLSHDDPKEHVQQLEKVFQILLQAGYVVSLKKSEIGQKTVEFLGFNITKEGRGLTDTFKTKLLNITPPKDLKQLQSILGLLNFARNFIPNFAELVQPLYNLIASAKGKYIEWSEENTKQLNMVIEALNTASNLEERLPEQRLVIKVNTSPSAGYVRYYNETGKKPIMYLNYVFSKAELKFSMLEKLLTTMHKALIKAMDLAMGQEILVYSPIVSMTKIQKTPLPERKALPIRWITWMTYLEDPRIQFHYDKTLPELKHIPDVYTSSQSPVKHPSQYEGVFYTDGSAIKSPDPTKSNNAGMGIVHATYKPEYQVLNQWSIPLGNHTAQMAEIAAVEFACKKALKIPGPVLVITDSFYVAESANKELPYWKSNGFVNNKKKPLKHISKWKSIAECLSMKPDITIQHEKGISLQIPVFILKGNALADKLATQGSYVVN

SEQ ID NO: 4459 - protein, 751 aa, synthetic construct
MNPLQLLQPLPAEIKGTKLLAHWNSGATITCIPESFLEDEQPIKKTLIKTIHGEKQQNVYYVTFKVKGRKVEAEVIASPYEYILLSPTDVPWLTQQPLQLTILVPLQEYQEKILSKTALPEDQKQQLKTLFVKYDNLWQHWENQVGHRKIRPHNIATGDYPPRPQKQYPINPKAKPSIQIVIDDLLKQGVLTPQNSTMNTPVYPVPKPDGRWRMVLDYREVNKTIPLTAAQNQHSAGILATIVRQKYKTTLDLANGFWAHPITPESYWLTAFTWQGKQYCWTRLPQGFLNSPALFNADVVDLLKEIPNVQVYVDDIYLSHDDPKEHVQQLEKVFQILLQAGYVVSLKKSEIGQKTVEFLGFNITKEGRGLTDTFKTKLLNITPPKDLKQLQSILGLLNFARNFIPNFAELVQPLYNLIAPAKGKYIEWSEENTKQLNMVIEALNTASNLEERLPEQRLVIKVNTSPSAGYVRYYNETGKKPIMYLNYVFSKAELKFSMLEKLLTTMHKALIKAMDLAMGQEILVYSPIVSMTKIQKTPLPERKALPIRWITWMTYLEDPRIQFHYDKTLPELKHIPDVYTSSQSPVKHPSQYEGVFYTDGSAIKSPDPTKSNNAGMGIVHATYKPEYQVLNQWSIPLGNHTAQMAEIAAVEFACKKALKIPGPVLVITDSFYVAESANKELPYWKSNGFVNNKKKPLKHISKWKSIAECLSMKPDITIQHEKGISLQIPVFILKGNALADKLATQGSYVVN

SEQ ID NO: 4460 - protein, 751 aa, synthetic construct
MNPLQLLQPLPAEIKGTKLLAHWNSGATITCIPESFLEDEQPIKKTLIKTIHGEKQQNVYYVTFKVKGRKVEAEVIASPYEYILLSPTDVPWLTQQPLQLTILVPLQEYQEKILSKTALPEDQKQQLKTLFVKYDNLWQHWENQVGHRKIRPHNIATGDYPPRPQKQYPINPKAKPSIQIVIDDLLKQGVLTPQNSTMNTPVYPVPKPDGRWRMVLDYREVNKTIPLTAAQNQHSAGILATIVRQKYKTTLDLANGFWAHPITPESYWLTAFTWQGKQYCWTRLPQGFLNSPALFNADVVDLLKEIPNVQVYVDDIYLSHDDPKEHVQQLEKVFQILLQAGYVVSLKKSEIGQKTVEFLGFNITKEGRGLTDTFKTKLLNITPPKDLKQLQSILGKLNFARNFIPNFAELVQPLYNLIAPAKGKYIEWSEENTKQLNMVIEALNTASNLEERLPEQRLVIKVNTSPSAGYVRYYNETGKKPIMYLNYVFSKAELKFSMLEKLLTTMHKALIKAMDLAMGQEILVYSPIVSMTKIQKTPLPERKALPIRWITWMTYLEDPRIQFHYDKTLPELKHIPDVYTSSQSPVKHPSQYEGVFYTDGSAIKSPDPTKSNNAGMGIVHATYKPEYQVLNQWSIPLGNHTAQMAEIAAVEFACKKALKIPGPVLVITDSFYVAESANKELPYWKSNGFVNNKKKPLKHISKWKSIAECLSMKPDITIQHEKGISLQIPVFILKGNALADKLATQGSYVVN

SEQ ID NO: 4461 - protein, 662 aa, unidentified
VPWLTQQPLQLTILVPLQEYQEKILSKTALPEDQKQQLKTLFVKYDNLWQHWENQVGHRKIRPHNIATGDYPPRPQKQYPINPKAKPSIQIVIDDLLKQGVLTPQNSTMNTPVYPVPKPDGRWRMVLDYREVNKTIPLTAAQNQHSAGILATIVRQKYKTTLDLANGFWAHPITPESYWLTAFTWQGKQYCWTRLPQGFLNSPALFTADVVDLLKEIPNVQVYVDDIYLSHDDPKEHVQQLEKVFQILLQAGYVVSLKKSEIGQKTVEFLGFNITKEGRGLTDTFKTKLLNITPPKDLKQLQSILGLLNFARNFIPNFAELVQPLYNLIASAKGKYIEWSEENTKQLNMVIEALNTASNLEERLPEQRLVIKVNTSPSAGYVRYYNETGKKPIMYLNYVFSKAELKFSMLEKLLTTMHKALIKAMDLAMGQEILVYSPIVSMTKIQKTPLPERKALPIRWITWMTYLEDPRIQFHYDKTLPELKHIPDVYTSSQSPVKHPSQYEGVFYTDGSAIKSPDPTKSNNAGMGIVHATYKPEYQVLNQWSIPLGNHTAQMAEIAAVEFACKKALKIPGPVLVITDSFYVAESANKELPYWKSNGFVNNKKKPLKHISKWKSIAECLSMKPDITIQHEKGISLQIPVFILKGNALADKLATQGSYVVN

SEQ ID NO: 4462 - protein, 662 aa, synthetic construct
VPWLTQQPLQLTILVPLQEYQEKILSKTALPEDQKQQLKTLFVKYDNLWQHWENQVGHRKIRPHNIATGDYPPRPQKQYPINPKAKPSIQIVIDDLLKQGVLTPQNSTMNTPVYPVPKPDGRWRMVLDYREVNKTIPLTAAQNQHSAGILATIVRQKYKTTLDLANGFWAHPITPESYWLTAFTWQGKQYCWTRLPQGFLNSPALFNADVVDLLKEIPNVQVYVDDIYLSHDDPKEHVQQLEKVFQILLQAGYVVSLKKSEIGQKTVEFLGFNITKEGRGLTDTFKTKLLNITPPKDLKQLQSILGLLNFARNFIPNFAELVQPLYNLIAPAKGKYIEWSEENTKQLNMVIEALNTASNLEERLPEQRLVIKVNTSPSAGYVRYYNETGKKPIMYLNYVFSKAELKFSMLEKLLTTMHKALIKAMDLAMGQEILVYSPIVSMTKIQKTPLPERKALPIRWITWMTYLEDPRIQFHYDKTLPELKHIPDVYTSSQSPVKHPSQYEGVFYTDGSAIKSPDPTKSNNAGMGIVHATYKPEYQVLNQWSIPLGNHTAQMAEIAAVEFACKKALKIPGPVLVITDSFYVAESANKELPYWKSNGFVNNKKKPLKHISKWKSIAECLSMKPDITIQHEKGISLQIPVFILKGNALADKLATQGSYVVN

SEQ ID NO: 4463 - protein, 662 aa, synthetic construct
VPWLTQQPLQLTILVPLQEYQEKILSKTALPEDQKQQLKTLFVKYDNLWQHWENQVGHRKIRPHNIATGDYPPRPQKQYPINPKAKPSIQIVIDDLLKQGVLTPQNSTMNTPVYPVPKPDGRWRMVLDYREVNKTIPLTAAQNQHSAGILATIVRQKYKTTLDLANGFWAHPITPESYWLTAFTWQGKQYCWTRLPQGFLNSPALFNADVVDLLKEIPNVQVYVDDIYLSHDDPKEHVQQLEKVFQILLQAGYVVSLKKSEIGQKTVEFLGFNITKEGRGLTDTFKTKLLNITPPKDLKQLQSILGKLNFARNFIPNFAELVQPLYNLIAPAKGKYIEWSEENTKQLNMVIEALNTASNLEERLPEQRLVIKVNTSPSAGYVRYYNETGKKPIMYLNYVFSKAELKFSMLEKLLTTMHKALIKAMDLAMGQEILVYSPIVSMTKIQKTPLPERKALPIRWITWMTYLEDPRIQFHYDKTLPELKHIPDVYTSSQSPVKHPSQYEGVFYTDGSAIKSPDPTKSNNAGMGIVHATYKPEYQVLNQWSIPLGNHTAQMAEIAAVEFACKKALKIPGPVLVITDSFYVAESANKELPYWKSNGFVNNKKKPLKHISKWKSIAECLSMKPDITIQHEKGISLQIPVFILKGNALADKLATQGSYVVN

SEQ ID NO: 4464 - protein, 669 aa, Gibbon ape leukemia virus
VLNLEEEYRLHEKPVPSSIDPSWLQLFPTVWAERAGMGLANQVPPVVVELRSGASPVAVRQYPMSKEAREGIRPHIQKFLDLGVLVPCRSPWNTPLLPVKKPGTNDYRPVQDLREINKRVQDIHPTVPNPYNLLSSLPPSYTWYSVLDLKDAFFCLRLHPNSQPLFAFEWKDPEKGNTGQLTWTRLPQGFKNSPTLFDEALHRDLAPFRALNPQVVLLQYVDDLLVAAPTYEDCKKGTQKLLQELSKLGYRVSAKKAQLCQREVTYLGYLLKEGKRWLTPARKATVMKIPVPTTPRQVREFLGTAGFCRLWIPGFASLAAPLYPLTKESIPFIWTEEHQQAFDHIKKALLSAPALALPDLTKPFTLYIDERAGVARGVLTQTLGPWRRPVAYLSKKLDPVASGWPTCLKAVAAVALLLKDADKLTLGQNVTVIASHSLESIVRQPPDRWMTNARMTHYQSLLLNERVSFAPPAVLNPATLLPVESEATPVHRCSEILAEETGTRRDLEDQPLPGVPTWYTDGSSFITEGKRRAGAPIVDGKRTVWASSLPEGTSAQKAELVALTQALRLAEGKNINIYTDSRYAFATAHIHGAIYKQRGLLTSAGKDIKNKEEILALLEAIHLPRRVAIIHCPGHQRGSNPVATGNRRADEAAKQAALSTRVLAGTTKP

SEQ ID NO: 4465 - protein, 669 aa, synthetic construct
VLNLEEEYRLHEKPVPSSIDPSWLQLFPTVWAERAGMGLANQVPPVVVELRSGASPVAVRQYPMSKEAREGIRPHIQKFLDLGVLVPCRSPWNTPLLPVKKPGTNDYRPVQDLREINKRVQDIHPTVPNPYNLLSSLPPSYTWYSVLDLKDAFFCLRLHPNSQPLFAFEWKDPEKGNTGQLTWTRLPQGFKNSPTLFNEALHRDLAPFRALNPQVVLLQYVDDLLVAAPTYEDCKKGTQKLLQELSKLGYRVSAKKAQLCQREVTYLGYLLKEGKRWLTPARKATVMKIPVPTTPRQVREFLGTAGFCRLWIPGFASLAAPLYPLTKPSIPFIWTEEHQQAFDHIKKALLSAPALALPDLTKPFTLYIDERAGVARGVLTQTLGPWRRPVAYLSKKLDPVASGWPTCLKAVAAVALLLKDADKLTLGQNVTVIASHSLESIVRQPPDRWMTNARMTHYQSLLLNERVSFAPPAVLNPATLLPVESEATPVHRCSEILAEETGTRRDLEDQPLPGVPTWYTDGSSFITEGKRRAGAPIVDGKRTVWASSLPEGTSAQKAELVALTQALRLAEGKNINIYTDSRYAFATAHIHGAIYKQRGWLTSAGKDIKNKEEILALLEAIHLPRRVAIIHCPGHQRGSNPVATGNRRADEAAKQAALSTRVLAGTTKP

SEQ ID NO: 4466 - protein, 669 aa, synthetic construct
VLNLEEEYRLHEKPVPSSIDPSWLQLFPTVWAERAGMGLANQVPPVVVELRSGASPVAVRQYPMSKEAREGIRPHIQKFLDLGVLVPCRSPWNTPLLPVKKPGTNDYRPVQDLREINKRVQDIHPTVPNPYNLLSSLPPSYTWYSVLDLKDAFFCLRLHPNSQPLFAFEWKDPEKGNTGQLTWTRLPQGFKNSPTLFNEALHRDLAPFRALNPQVVLLQYVDDLLVAAPTYEDCKKGTQKLLQELSKLGYRVSAKKAQLCQREVTYLGYLLKEGKRWLTPARKATVMKIPVPTTPRQVREFLGKAGFCRLFIPGFASLAAPLYPLTKPSIPFIWTEEHQQAFDHIKKALLSAPALALPDLTKPFTLYIDERAGVARGVLTQTLGPWRRPVAYLSKKLDPVASGWPTCLKAVAAVALLLKDADKLTLGQNVTVIASHSLESIVRQPPDRWMTNARMTHYQSLLLNERVSFAPPAVLNPATLLPVESEATPVHRCSEILAEETGTRRDLEDQPLPGVPTWYTDGSSFITEGKRRAGAPIVDGKRTVWASSLPEGTSAQKAELVALTQALRLAEGKNINIYTDSRYAFATAHIHGAIYKQRGWLTSAGKDIKNKEEILALLEAIHLPRRVAIIHCPGHQRGSNPVATGNRRADEAAKQAALSTRVLAGTTKP

SEQ ID NO: 4467 - protein, 588 aa, unidentified
AVLGLEHLPRPPQISQFPLNPERLQALQHLVRKALEAGHIEPYTGPGNNPVFPVKKANGTWRFIHDLRATNSLTIDLSSSSPGPPDLSSLPTTLAHLQTIDLRDAFFQIPLPKQFQPYFAFTVPQQCNYGPGTRYAWKVLPQGFKNSPTLFEMQLAHILQPIRQAFPQCTILQYMDDILLASPSHEDLLLLSEATMASLISHGLPVSENKTQQTPGTIKFLGQIISPNHLTYDAVPTVPIRSRWALPELQALLGEIQWVSKGTPTLRQPLHSLYCALQRHTDPRDQIYLNPSQVQSLVQLRQALSQNCRSRLVQTLPLLGAIMLTLTGTTTVVFQSKEQWPLVWLHAPLPHTSQCPWGQLLASAVLLLDKYTLQSYGLLCQTIHHNISTQTFNQFIQTSDHPSVPILLHHSHRFKNLGAQTGELWNTFLKTAAPLAPVKALMPVFTLSPVIINTAPCLFSDGSTSRAAYILWDKQILSQRSFPLPPPHKSAQRAELLGLLHGLSSARSWRCLNIFLDSKYLYHYLRTLALGTFQGRSSQAPFQALLPRLLSRKVVYLHHVRSHTNLPDPISRLNALTDALLITPVLQL

SEQ ID NO: 4468 - protein, 588 aa, synthetic construct
AVLGLEHLPRPPQISQFPLNPERLQALQHLVRKALEAGHIEPYTGPGNNPVFPVKKANGTWRFIHDLRATNSLTIDLSSSSPGPPDLSSLPTTLAHLQTIDLRDAFFQIPLPKQFQPYFAFTVPQQCNYGPGTRYAWKVLPQGFKNSPTLFQMQLAHILQPIRQAFPQCTILQYMDDILLASPSHEDLLLLSEATMASLISHGLPVSENKTQQTPGTIKFLGQIISPNHLTYDAVPTVPIRSRWALPELQALLGEIQWVSKGTPTLRQPLHSLYCALQPHTDPRDQIYLNPSQVQSLVQLRQALSQNCRSRLVQTLPLLGAIMLTLTGTTTVVFQSKEQWPLVWLHAPLPHTSQCPWGQLLASAVLLLDKYTLQSYGLLCQTIHHNISTQTFNQFIQTSDHPSVPILLHHSHRFKNLGAQTGELWNTFLKTAAPLAPVKALMPVFTLSPVIINTAPCLFSDGSTSRAAYILWDKQILSQRSFPLPPPHKSAQRAELLGLLHGLSSARSWRCLNIFLDSKYLYHYLRTLALGTFQGRSSQAPFQALLPRLLSRKVVYLHHVRSHTNLPDPISRLNALTDALLITPVLQL

SEQ ID NO: 4469 - protein, 588 aa, synthetic construct
AVLGLEHLPRPPQISQFPLNPERLQALQHLVRKALEAGHIEPYTGPGNNPVFPVKKANGTWRFIHDLRATNSLTIDLSSSSPGPPDLSSPPTTLAHLQTIDLRDAFFQIPLPKQFQPYFAFTVPQQCNYGPGTRYAWKVLPQGFKNSPTLFQMQLAHILQPIRQAFPQCTILQYMDDILLASPSHEDLLLLSEATMASLISHGLPVSENKTQQTPGTIKFLGQIISPNHLTYDAVPTVPIRSRWALPELQALLGEIQWVSKGTPTLRQPLHSLYCALQPHTDPRDQIYLNPSQVQSLVQLRQALSQNCRSRLVQTLPLLGAIMLTLTGTTTVVFQSKEQWPLVWLHAPLPHTSQCPWGQLLASAVLLLDKYTLQSYGLLCQTIHHNISTQTFNQFIQTSDHPSVPILLHHSHRFKNLGAQTGELWNTFLKTAAPLAPVKALMPVFTLSPVIINTAPCLFSDGSTSRAAYILWDKQILSQRSFPLPPPHKSAQRAELLGLLHGLSSARSWRCLNIFLDSKYLYHYLRTLALGTFQGRSSQAPFQALLPRLLSRKVVYLHHVRSHTNLPDPISRLNALTDALLITPVLQL

SEQ ID NO: 4470 - protein, 588 aa, unidentified
AVLGLEHLPRPPEISQFPLNPERLQALQHLVRKALEAGHIEPYTGPGNNPVFPVKKANGTWRFIHDLRATNSLTIDLSSSSPGPPDLSSLPTTLAHLQTIDLKDAFFQIPLPKQFQPYFAFTVPQQCNYGPGTRYAWRVLPQGFKNSPTLFEMQLAHILQPIRQAFPQCTILQYMDDILLASPSHADLQLLSEATMASLISHGLPVSENKTQQTPGTIKFLGQIISPNHLTYDAVPKVPIRSRWALPELQALLGEIQWVSKGTPTLRQPLHSLYCALQRHTDPRDQIYLNPSQVQSLVQLRQALSQNCRSRLVQTLPLLGAIMLTLTGTTTVVFQSKQQWPLVWLHAPLPHTSQCPWGQLLASAVLLLDKYTLQSYGLLCQTIHHNISTQTFNQFIQTSDHPSVPILLHHSHRFKNLGAQTGELWNTFLKTTAPLAPVKALMPVFTLSPVIINTAPCLFSDGSTSQAAYILWDKHILSQRSFPLPPPHKSAQRAELLGLLHGLSSARSWRCLNIFLDSKYLYHYLRTLALGTFQGRSSQAPFQALLPRLLSRKVVYLHHVRSHTNLPDPISRLNALTDALLITPVLQL

SEQ ID NO: 4471 - protein, 588 aa, synthetic construct
AVLGLEHLPRPPEISQFPLNPERLQALQHLVRKALEAGHIEPYTGPGNNPVFPVKKANGTWRFIHDLRATNSLTIDLSSSSPGPPDLSSLPTTLAHLQTIDLKDAFFQIPLPKQFQPYFAFTVPQQCNYGPGTRYAWRVLPQGFKNSPTLFQMQLAHILQPIRQAFPQCTILQYMDDILLASPSHADLQLLSEATMASLISHGLPVSENKTQQTPGTIKFLGQIISPNHLTYDAVPKVPIRSRWALPELQALLGEIQWVSKGTPTLRQPLHSLYCALQPHTDPRDQIYLNPSQVQSLVQLRQALSQNCRSRLVQTLPLLGAIMLTLTGTTTVVFQSKQQWPLVWLHAPLPHTSQCPWGQLLASAVLLLDKYTLQSYGLLCQTIHHNISTQTFNQFIQTSDHPSVPILLHHSHRFKNLGAQTGELWNTFLKTTAPLAPVKALMPVFTLSPVIINTAPCLFSDGSTSQAAYILWDKHILSQRSFPLPPPHKSAQRAELLGLLHGLSSARSWRCLNIFLDSKYLYHYLRTLALGTFQGRSSQAPFQALLPRLLSRKVVYLHHVRSHTNLPDPISRLNALTDALLITPVLQL

SEQ ID NO: 4472 - protein, 583 aa, unidentified
GLEHLPRPPEISQFPLNPERLQALQHLVRKALEAGHIEPYTGPGNNPVFPVKKANGTWRFIHDLRATNSLTVDLSSSSPGPPDLSSLPTTLAHLQTIDLKDAFFQIPLPKQFQPYFAFTVPQQCNYGPGTRYAWKVLPQGFKNSPTLFEMQLASILQPIRQAFPQCVILQYMDDILLASPSPEDLQQLSEATMASLISHGLPVSQDKTQQTPGTIKFLGQIISPNHITYDAVPTVPIRSRWALPELQALLGEIQWVSKGTPTLRQPLHSLYCALQGHTDPRDQIYLNPSQVQSLMQLQQALSQNCRSRLAQTLPLLGAIMLTLTGTTTVVFQSKQQWPLVWLHAPLPHTSQCPWGQLLASAVLLLDKYTLQSYGLLCQTIHHNISIQTFNQFIQTSDHPSVPILLHHSHRFKNLGAQTGELWNTFLKTAAPLAPVKALTPVFTLSPIIINTAPCLFSDGSTSQAAYILWDKHILSQRSFPLPPPHKSAQQAELLGLLHGLSSARSWHCLNIFLDSKYLYHYLRTLALGTFQGKSSQAPFQALLPRLLAHKVIYLHHVRSHTNLPDPISKLNALTDALLITPIL

SEQ ID NO: 4473 - protein, 583 aa, synthetic construct
GLEHLPRPPEISQFPLNPERLQALQHLVRKALEAGHIEPYTGPGNNPVFPVKKANGTWRFIHDLRATNSLTVDLSSSSPGPPDLSSLPTTLAHLQTIDLKDAFFQIPLPKQFQPYFAFTVPQQCNYGPGTRYAWKVLPQGFKNSPTLFQMQLASILQPIRQAFPQCVILQYMDDILLASPSPEDLQQLSEATMASLISHGLPVSQDKTQQTPGTIKFLGQIISPNHITYDAVPTVPIRSRWALPELQALLGEIQWVSKGTPTLRQPLHSLYCALQGHTDPRDQIYLNPSQVQSLMQLQQALSQNCRSRLAQTLPLLGAIMLTLTGTTTVVFQSKQQWPLVWLHAPLPHTSQCPWGQLLASAVLLLDKYTLQSYGLLCQTIHHNISIQTFNQFIQTSDHPSVPILLHHSHRFKNLGAQTGELWNTFLKTAAPLAPVKALTPVFTLSPIIINTAPCLFSDGSTSQAAYILWDKHILSQRSFPLPPPHKSAQQAELLGLLHGLSSARSWHCLNIFLDSKYLYHYLRTLAWGTFQGKSSQAPFQALLPRLLAHKVIYLHHVRSHTNLPDPISKLNALTDALLITPIL

SEQ ID NO: 4474 - protein, 583 aa, synthetic construct
GLEHLPRPPEISQFPLNPERLQALQHLVRKALEAGHIEPYTGPGNNPVFPVKKANGTWRFIHDLRATNSLTVDLSSSSPGPPDLSSPPTTLAHLQTIDLKDAFFQIPLPKQFQPYFAFTVPQQCNYGPGTRYAWKVLPQGFKNSPTLFQMQLASILQPIRQAFPQCVILQYMDDILLASPSPEDLQQLSEATMASLISHGLPVSQDKTQQTPGTIKFLGQIISPNHITYDAVPTVPIRSRWALPELQALLGEIQWVSKGTPTLRQPLHSLYCALQGHTDPRDQIYLNPSQVQSLMQLQQALSQNCRSRLAQTLPLLGAIMLTLTGTTTVVFQSKQQWPLVWLHAPLPHTSQCPWGQLLASAVLLLDKYTLQSYGLLCQTIHHNISIQTFNQFIQTSDHPSVPILLHHSHRFKNLGAQTGELWNTFLKTAAPLAPVKALTPVFTLSPIIINTAPCLFSDGSTSQAAYILWDKHILSQRSFPLPPPHKSAQQAELLGLLHGLSSARSWHCLNIFLDSKYLYHYLRTLAWGTFQGKSSQAPFQALLPRLLAHKVIYLHHVRSHTNLPDPISKLNALTDALLITPIL

SEQ ID NO: 4475 - protein, 584 aa, unidentified
GLEHLPPPPEVSQFPLNPERLQALTDLVSRALEAKHIEPYQGPGNNPIFPVKKPNGKWRFIHDLRATNSVTRDLASPSPGPPDLTSLPQGLPHLRTIDLTDAFFQIPLPTIFQPYFAFTLPQPNNYGPGTRYSWRVLPQGFKNSPTLFEQQLSHILTPVRKTFPNSLIIQYMDDILLASPAPGELAALTDKVTNALTKEGLPLSPEKTQATPGPIHFLGQVISQDCITYETLPSINVKSTWSLAELQSMLGELQWVSKGTPVLRSSLHQLYLALRGHRDPRDTIKLTSIQVQALRTIQKALTLNCRSRLVNQLPILALIMLRPTGTTAVLFQTKQKWPLVWLHTPHPATSLRPWGQLLANAVIILDKYSLQHYGQVCKSFHHNISNQALTYYLHTSDQSSVAILLQHSHRFHNLGAQPSGPWRSLLQMPQIFQNIDVLRPPFTISPVVINHAPCLFSDGSASKAAFIIWDRQVIHQQVLSLPSTCSAQAGELFGLLAGLQKSQPWVALNIFLDSKFLIGHLRRMALGAFPGPSTQCELHTQLLPLLQGKTVYVHHVRSHTLLQDPISRLNEATDALMLAPLLPL

SEQ ID NO: 4476 - protein, 584 aa, synthetic construct
GLEHLPPPPEVSQFPLNPERLQALTDLVSRALEAKHIEPYQGPGNNPIFPVKKPNGKWRFIHDLRATNSVTRDLASPSPGPPDLTSLPQGLPHLRTIDLTDAFFQIPLPTIFQPYFAFTLPQPNNYGPGTRYSWRVLPQGFKNSPTLFQQQLSHILTPVRKTFPNSLIIQYMDDILLASPAPGELAALTDKVTNALTKEGLPLSPEKTQATPGPIHFLGQVISQDCITYETLPSINVKSTWSLAELQSMLGELQWVSKGTPVLRSSLHQLYLALRGHRDPRDTIKLTSIQVQALRTIQKALTLNCRSRLVNQLPILALIMLRPTGTTAVLFQTKQKWPLVWLHTPHPATSLRPWGQLLANAVIILDKYSLQHYGQVCKSFHHNISNQALTYYLHTSDQSSVAILLQHSHRFHNLGAQPSGPWRSLLQMPQIFQNIDVLRPPFTISPVVINHAPCLFSDGSASKAAFIIWDRQVIHQQVLSLPSTCSAQAGELFGLLAGLQKSQPWVALNIFLDSKFLIGHLRRMAWGAFPGPSTQCELHTQLLPLLQGKTVYVHHVRSHTLLQDPISRLNEATDALMLAPLLPL

SEQ ID NO: 4477 - protein, 584 aa, synthetic construct
GLEHLPPPPEVSQFPLNPERLQALTDLVSRALEAKHIEPYQGPGNNPIFPVKKPNGKWRFIHDLRATNSVTRDLASPSPGPPDLTSPPQGLPHLRTIDLTDAFFQIPLPTIFQPYFAFTLPQPNNYGPGTRYSWRVLPQGFKNSPTLFQQQLSHILTPVRKTFPNSLIIQYMDDILLASPAPGELAALTDKVTNALTKEGLPLSPEKTQATPGPIHFLGQVISQDCITYETLPSINVKSTWSLAELQSMLGELQWVSKGTPVLRSSLHQLYLALRGHRDPRDTIKLTSIQVQALRTIQKALTLNCRSRLVNQLPILALIMLRPTGTTAVLFQTKQKWPLVWLHTPHPATSLRPWGQLLANAVIILDKYSLQHYGQVCKSFHHNISNQALTYYLHTSDQSSVAILLQHSHRFHNLGAQPSGPWRSLLQMPQIFQNIDVLRPPFTISPVVINHAPCLFSDGSASKAAFIIWDRQVIHQQVLSLPSTCSAQAGELFGLLAGLQKSQPWVALNIFLDSKFLIGHLRRMAWGAFPGPSTQCELHTQLLPLLQGKTVYVHHVRSHTLLQDPISRLNEATDALMLAPLLPL

SEQ ID NO: 4478 - protein, 584 aa, unidentified
GLEHLPPPPEVSQFPLNPERLQALTDLVSRALEAKHIEPYQGPGNNPIFPVKKPNGKWRFIHDLRATNSLTRDLASPSPGPPDLTSLPQDLPHLRTIDLTDAFFQIPLPAVFQPYFAFTLPQPNNHGPGTRYSWRVLPQGFKNSPTLFEQQLSHILAPVRKAFPNSLIIQYMDDILLASPALRELTALTDKVTNALTKEGLPMSLEKTQATPGSIHFLGQVISPDCITYETLPSIHVKSIWSLAELQSMLGELQWVSKGTPVLRSSLHQLYLALRGHRDPRDTIELTSTQVQALKTIQKALALNCRSRLVSQLPILALIILRPTGTTAVLFQTKQKWPLVWLHTPHPATSLRPWGQLLANAIITLDKYSLQHYGQICKSFHHNISNQALTYYLHTSDQSSVAILLQHSHRFHNLGAQPSGPWRSLLQVPQIFQNIDVLRPPFIISPVVIDHAPCLFSDGATSKAAFILWDKQVIHQQVLPLPSTCSAQAGELFGLLAGLQKSKPWPALNIFLDSKFLIGHLRRMALGAFLGPSTQCDLHARLFPLLQGKTVYVHHVRSHTLLQDPISRLNEATDALMLAPLLPL

SEQ ID NO: 4479 - protein, 584 aa, synthetic construct
GLEHLPPPPEVSQFPLNPERLQALTDLVSRALEAKHIEPYQGPGNNPIFPVKKPNGKWRFIHDLRATNSLTRDLASPSPGPPDLTSLPQDLPHLRTIDLTDAFFQIPLPAVFQPYFAFTLPQPNNHGPGTRYSWRVLPQGFKNSPTLFQQQLSHILAPVRKAFPNSLIIQYMDDILLASPALRELTALTDKVTNALTKEGLPMSLEKTQATPGSIHFLGQVISPDCITYETLPSIHVKSIWSLAELQSMLGELQWVSKGTPVLRSSLHQLYLALRGHRDPRDTIELTSTQVQALKTIQKALALNCRSRLVSQLPILALIILRPTGTTAVLFQTKQKWPLVWLHTPHPATSLRPWGQLLANAIITLDKYSLQHYGQICKSFHHNISNQALTYYLHTSDQSSVAILLQHSHRFHNLGAQPSGPWRSLLQVPQIFQNIDVLRPPFIISPVVIDHAPCLFSDGATSKAAFILWDKQVIHQQVLPLPSTCSAQAGELFGLLAGLQKSKPWPALNIFLDSKFLIGHLRRMAWGAFLGPSTQCDLHARLFPLLQGKTVYVHHVRSHTLLQDPISRLNEATDALMLAPLLPL

SEQ ID NO: 4480 - protein, 584 aa, synthetic construct
GLEHLPPPPEVSQFPLNPERLQALTDLVSRALEAKHIEPYQGPGNNPIFPVKKPNGKWRFIHDLRATNSLTRDLASPSPGPPDLTSPPQDLPHLRTIDLTDAFFQIPLPAVFQPYFAFTLPQPNNHGPGTRYSWRVLPQGFKNSPTLFQQQLSHILAPVRKAFPNSLIIQYMDDILLASPALRELTALTDKVTNALTKEGLPMSLEKTQATPGSIHFLGQVISPDCITYETLPSIHVKSIWSLAELQSMLGELQWVSKGTPVLRSSLHQLYLALRGHRDPRDTIELTSTQVQALKTIQKALALNCRSRLVSQLPILALIILRPTGTTAVLFQTKQKWPLVWLHTPHPATSLRPWGQLLANAIITLDKYSLQHYGQICKSFHHNISNQALTYYLHTSDQSSVAILLQHSHRFHNLGAQPSGPWRSLLQVPQIFQNIDVLRPPFIISPVVIDHAPCLFSDGATSKAAFILWDKQVIHQQVLPLPSTCSAQAGELFGLLAGLQKSKPWPALNIFLDSKFLIGHLRRMAWGAFLGPSTQCDLHARLFPLLQGKTVYVHHVRSHTLLQDPISRLNEATDALMLAPLLPL

SEQ ID NO: 4481 - protein, 584 aa, synthetic construct
HLPPPPQVDQFPLNLPERLQALNDLVSKALEAGHIEPYSGPGNNPVFPVKKPNGKWRFIHDLRATNAITTTLTSPSPGPPDLTSLPTALPHLQTIDLTDAFFQIPLPKQYQPYFAFTIPQPCNYGPGTRYAWTVLPQGFKNSPTLFQQQLAAVLNPMRKMFPTSTIVQYMDDILLASPTNEELQQLSQLTLQALTTHGLPISQEKTQQTPGQIRFLGQVISPNHITYESTPTIPIKSQWTLTELQVILGEIQWVSKGTPILRKHLQSLYSALHPYRDPRACITLTPQQLHALHAIQQALQHNCRGRLNPALPLLGLISLSTSGTTSVIFQPKQNWPLAWLHTPHPPTSLCPWGHLLACTILTLDKYTLQHYGQLCQSFHHNMSKQALCDFLRNSPHPSVGILIHHMGRFHNLGSQPSGPWKTLLHLPTLLQEPRLLRPIFTLSPVVLDTAPCLFSDGSPQKAAYVLWDQTILQQDITPLPSHETHSAQKGELLALICGLRAAKPWPSLNIFLDSKYLIKYLHSLAIGAFLGTSAHQTLQAALPPLLQGKTIYLHHVRSHTNLPDPISTFNEYTDSLILAPLVPL

SEQ ID NO: 4482 - protein, 581 aa, Jaagsiekte sheep retrovirus
PLGTSDSPVTHADPIDWKSEEPVWVDQWPLTQEKLSAAQQLVQEQLRLGHIEPSTSAWNSPIFVIKKKSGKWRLLQDLRKVNETMMHMGALQPGLPTPSAIPDKSYIIVIDLKDCFYTIPLAPQDCKRFAFSLPSVNFKEPMQRYQWRVLPQGMTNSPTLCQKFVATAIAPVRQRFPQLYLVHYMDDILLAHTDEHLLYQAFSILKQHLSLNGLVIADEKIQTHFPYNYLGFSLYPRVYNTQLVKLQTDHLKTLNDFQKLLGDINWIRPYLKLPTYTLQPLFDILKGDSDPASPRTLSLEGRTALQSIEEAIRQQQITYCDYQRSWGLYILPTPRAPTGVLYQDKPLRWIYLSATPTKHLLPYYELVAKIIAKGRHEAIQYFGMEPPFICVPYALEQQDWLFQFSDNWSIAFANYPGQITHHYPSDKLLQFASSHAFIFPKIVRRQPIPEATLIFTDGSSNGTAALIINHQTYYAQTSFSSAQVVELFAVHQALLTVPTSFNLFTDSSYVVGALQMIETVPIIGTTSPEVLNLFTLIQQVLHCRQHPCFFGHIRAHSTLPGALVQGNHTADVLTKQVFFQS

SEQ ID NO: 4483 - protein, 581 aa, synthetic construct
PLGTSDSPVTHADPIDWKSEEPVWVDQWPLTQEKLSAAQQLVQEQLRLGHIEPSTSAWNSPIFVIKKKSGKWRLLQDLRKVNETMMHMGALQPGLPTPSPIPDKSYIIVIDLKDCFYTIPLAPQDCKRFAFSLPSVNFKEPMQRYQWRVLPQGMTNSPTLCQKFVATAIAPVRQRFPQLYLVHYMDDILLAHTDEHLLYQAFSILKQHLSLNGLVIADEKIQTHFPYNYLGFSLYPRVYNTQLVKLQTDHLKTLNDFQKLLGDINWIRPYLKLPTYTLQPLFDILKGDSDPASPRTLSLEGRTALQSIEEAIRQQQITYCDYQRSWGLYILPTPRAPTGVLYQDKPLRWIYLSATPTKHLLPYYELVAKIIAKGRHEAIQYFGMEPPFICVPYALEQQDWLFQFSDNWSIAFANYPGQITHHYPSDKLLQFASSHAFIFPKIVRRQPIPEATLIFTDGSSNGTAALIINHQTYYAQTSFSSAQVVELFAVHQALLTVPTSFNLFTDSSYVVGALQMIETVPIIGTTSPEVLNLFTLIQQVLHCRQHPCFFGHIRAHSTLPGALVQGNHTADVLTKQVFFQS

SEQ ID NO: 4484 - protein, 793 aa, Koala retrovirus
TLGDQGSRGSDPLPEPRVTLTVEGIPTEFLVNTGAEHSVLTKPMGKMGSKRTVVAGATGSKVYPWTTKRLLKIGQKQVTHSFLVIPECPAPLLGRDLLTKLKAQIQFSTEGPQVTWEDRPAMCLVLNLEEEYRLHEKPVPPSIDPSWLQLFPMVWAEKAGMGLANQVPPVVVELKSDASPVAVRQYPMSKEAREGIRPHIQRFLDLGILVPCQSPWNTPLLPVKKPGTNDYRPVQDLREVNKRVQDIHPTVPNPYNLLSSLPPSHTWYSVLDLKDAFFCLKLHPNSQPLFAFEWRDPEKGNTGQLTWTRLPQGFKNSPTLFDEALHRDLASFRALNPQVVMLQYVDDLLVAAPTYRDCKEGTRRLLQELSKLGYRVSAKKAQLCREEVTYLGYLLKGGKRWLTPARKATVMKIPTPTTPRQVREFLGTAGFCRLWIPGFASLAAPLYPLTREKVPFTWTEAHQEAFGRIKEALLSAPALALPDLTKPFALYVDEKEGVARGVLTQTLGPWRRPVAYLSKKLDPVASGWPTCLKAIAAVALLLKDADKLTLGQNVLVIAPHNLESIVRQPPDRWMTNARMTHYQSLLLNERVSFAPPAILNPATLLPVESDDTPIHICSEILAEETGTRPDLRDQPLPGVPAWYTDGSSFIMDGRRQAGAAIVDNKRTVWASNLPEGTSAQKAELIALTQALRLAEGKSINIYTDSRYAFATAHVHGAIYKQRGLLTSAGKDIKNKEEILALLEAIHLPKRVAIIHCPGHQRGTDPVATGNRKADEAAKQAAQSTRILTETTKN

SEQ ID NO: 4485 - protein, 793 aa, synthetic construct
TLGDQGSRGSDPLPEPRVTLTVEGIPTEFLVNTGAEHSVLTKPMGKMGSKRTVVAGATGSKVYPWTTKRLLKIGQKQVTHSFLVIPECPAPLLGRDLLTKLKAQIQFSTEGPQVTWEDRPAMCLVLNLEEEYRLHEKPVPPSIDPSWLQLFPMVWAEKAGMGLANQVPPVVVELKSDASPVAVRQYPMSKEAREGIRPHIQRFLDLGILVPCQSPWNTPLLPVKKPGTNDYRPVQDLREVNKRVQDIHPTVPNPYNLLSSLPPSHTWYSVLDLKDAFFCLKLHPNSQPLFAFEWRDPEKGNTGQLTWTRLPQGFKNSPTLFNEALHRDLASFRALNPQVVMLQYVDDLLVAAPTYRDCKEGTRRLLQELSKLGYRVSAKKAQLCREEVTYLGYLLKGGKRWLTPARKATVMKIPTPTTPRQVREFLGTAGFCRLWIPGFASLAAPLYPLTRPKVPFTWTEAHQEAFGRIKEALLSAPALALPDLTKPFALYVDEKEGVARGVLTQTLGPWRRPVAYLSKKLDPVASGWPTCLKAIAAVALLLKDADKLTLGQNVLVIAPHNLESIVRQPPDRWMTNARMTHYQSLLLNERVSFAPPAILNPATLLPVESDDTPIHICSEILAEETGTRPDLRDQPLPGVPAWYTDGSSFIMDGRRQAGAAIVDNKRTVWASNLPEGTSAQKAELIALTQALRLAEGKSINIYTDSRYAFATAHVHGAIYKQRGWLTSAGKDIKNKEEILALLEAIHLPKRVAIIHCPGHQRGTDPVATGNRKADEAAKQAAQSTRILTETTKN

SEQ ID NO: 4486 - protein, 793 aa, synthetic construct
TLGDQGSRGSDPLPEPRVTLTVEGIPTEFLVNTGAEHSVLTKPMGKMGSKRTVVAGATGSKVYPWTTKRLLKIGQKQVTHSFLVIPECPAPLLGRDLLTKLKAQIQFSTEGPQVTWEDRPAMCLVLNLEEEYRLHEKPVPPSIDPSWLQLFPMVWAEKAGMGLANQVPPVVVELKSDASPVAVRQYPMSKEAREGIRPHIQRFLDLGILVPCQSPWNTPLLPVKKPGTNDYRPVQDLREVNKRVQDIHPTVPNPYNLLSSLPPSHTWYSVLDLKDAFFCLKLHPNSQPLFAFEWRDPEKGNTGQLTWTRLPQGFKNSPTLFNEALHRDLASFRALNPQVVMLQYVDDLLVAAPTYRDCKEGTRRLLQELSKLGYRVSAKKAQLCREEVTYLGYLLKGGKRWLTPARKATVMKIPTPTTPRQVREFLGKAGFCRLFIPGFASLAAPLYPLTRPKVPFTWTEAHQEAFGRIKEALLSAPALALPDLTKPFALYVDEKEGVARGVLTQTLGPWRRPVAYLSKKLDPVASGWPTCLKAIAAVALLLKDADKLTLGQNVLVIAPHNLESIVRQPPDRWMTNARMTHYQSLLLNERVSFAPPAILNPATLLPVESDDTPIHICSEILAEETGTRPDLRDQPLPGVPAWYTDGSSFIMDGRRQAGAAIVDNKRTVWASNLPEGTSAQKAELIALTQALRLAEGKSINIYTDSRYAFATAHVHGAIYKQRGWLTSAGKDIKNKEEILALLEAIHLPKRVAIIHCPGHQRGTDPVATGNRKADEAAKQAAQSTRILTETTKN

SEQ ID NO: 4487 - protein, 702 aa, Koala retrovirus
LLGRDLLTKLKAQIQFSTEGPQVTWEDRPAMCLVLNLEEEYRLHEKPVPPSIDPSWLQLFPMVWAEKAGMGLANQVPPVVVELKSDASPVAVRQYPMSKEAREGIRPHIQRFLDLGILVPCQSPWNTPLLPVKKPGTNDYRPVQDLREVNKRVQDIHPTVPNPYNLLSSLPPSHTWYSVLDLKDAFFCLKLHPNSQPLFAFEWRDPEKGNTGQLTWTRLPQGFKNSPTLFDEALHRDLASFRALNPQVVMLQYVDDLLVAAPTYRDCKEGTRRLLQELSKLGYRVSAKKAQLCREEVTYLGYLLKGGKRWLTPARKATVMKIPTPTTPRQVREFLGTAGFCRLWIPGFASLAAPLYPLTREKVPFTWTEAHQEAFGRIKEALLSAPALALPDLTKPFALYVDEKEGVARGVLTQTLGPWRRPVAYLSKKLDPVASGWPTCLKAIAAVALLLKDADKLTLGQNVLVIAPHNLESIVRQPPDRWMTNARMTHYQSLLLNERVSFAPPAILNPATLLPVESDDTPIHICSEILAEETGTRPDLRDQPLPGVPAWYTDGSSFIMDGRRQAGAAIVDNKRTVWASNLPEGTSAQKAELIALTQALRLAEGKSINIYTDSRYAFATAHVHGAIYKQRGLLTSAGKDIKNKEEILALLEAIHLPKRVAIIHCPGHQRGTDPVATGNRKADEAAKQAAQSTRILTETTKN

SEQ ID NO: 4488 - protein, 702 aa, synthetic construct
LLGRDLLTKLKAQIQFSTEGPQVTWEDRPAMCLVLNLEEEYRLHEKPVPPSIDPSWLQLFPMVWAEKAGMGLANQVPPVVVELKSDASPVAVRQYPMSKEAREGIRPHIQRFLDLGILVPCQSPWNTPLLPVKKPGTNDYRPVQDLREVNKRVQDIHPTVPNPYNLLSSLPPSHTWYSVLDLKDAFFCLKLHPNSQPLFAFEWRDPEKGNTGQLTWTRLPQGFKNSPTLFNEALHRDLASFRALNPQVVMLQYVDDLLVAAPTYRDCKEGTRRLLQELSKLGYRVSAKKAQLCREEVTYLGYLLKGGKRWLTPARKATVMKIPTPTTPRQVREFLGTAGFCRLWIPGFASLAAPLYPLTRPKVPFTWTEAHQEAFGRIKEALLSAPALALPDLTKPFALYVDEKEGVARGVLTQTLGPWRRPVAYLSKKLDPVASGWPTCLKAIAAVALLLKDADKLTLGQNVLVIAPHNLESIVRQPPDRWMTNARMTHYQSLLLNERVSFAPPAILNPATLLPVESDDTPIHICSEILAEETGTRPDLRDQPLPGVPAWYTDGSSFIMDGRRQAGAAIVDNKRTVWASNLPEGTSAQKAELIALTQALRLAEGKSINIYTDSRYAFATAHVHGAIYKQRGWLTSAGKDIKNKEEILALLEAIHLPKRVAIIHCPGHQRGTDPVATGNRKADEAAKQAAQSTRILTETTKN

SEQ ID NO: 4489 - protein, 702 aa, synthetic construct
LLGRDLLTKLKAQIQFSTEGPQVTWEDRPAMCLVLNLEEEYRLHEKPVPPSIDPSWLQLFPMVWAEKAGMGLANQVPPVVVELKSDASPVAVRQYPMSKEAREGIRPHIQRFLDLGILVPCQSPWNTPLLPVKKPGTNDYRPVQDLREVNKRVQDIHPTVPNPYNLLSSLPPSHTWYSVLDLKDAFFCLKLHPNSQPLFAFEWRDPEKGNTGQLTWTRLPQGFKNSPTLFNEALHRDLASFRALNPQVVMLQYVDDLLVAAPTYRDCKEGTRRLLQELSKLGYRVSAKKAQLCREEVTYLGYLLKGGKRWLTPARKATVMKIPTPTTPRQVREFLGKAGFCRLFIPGFASLAAPLYPLTRPKVPFTWTEAHQEAFGRIKEALLSAPALALPDLTKPFALYVDEKEGVARGVLTQTLGPWRRPVAYLSKKLDPVASGWPTCLKAIAAVALLLKDADKLTLGQNVLVIAPHNLESIVRQPPDRWMTNARMTHYQSLLLNERVSFAPPAILNPATLLPVESDDTPIHICSEILAEETGTRPDLRDQPLPGVPAWYTDGSSFIMDGRRQAGAAIVDNKRTVWASNLPEGTSAQKAELIALTQALRLAEGKSINIYTDSRYAFATAHVHGAIYKQRGWLTSAGKDIKNKEEILALLEAIHLPKRVAIIHCPGHQRGTDPVATGNRKADEAAKQAAQSTRILTETTKN

SEQ ID NO: 4490 - protein, 671 aa, unidentified
TLNLEDEYRLYETSAEPEVSPGSTWLSDFPQAWAETGGMGLAVRQAPLIIPLKATSTPVSIKQYPMSQEAKLGIKPHIQRLLDQGILVPCQSPWNTPLLPVKKPGTNDYRPVQDLREVNKRVEDIHPTVPNPYNLLSGLPPSHRWYTVLDLKDAFFCLRLHPTSQPLFAFEWRDPGMGISGQLTWTRLPQGFKNSPTLFDEALHRDLADFRIQHPDLILLQYVDDILLAATSELDCQQGTRALLLTLGNLGYRASAKKAQLCQKQVKYLGYLLKEGQRWLTEARKETVMGQPTPKTPRQLREFLGTAGFCRLWIPGFAEMAAPLYPLTKTGTLFNWGPDQQKAYQEIKQALLTAPALGLPDLTKPFELFVDEKQGYAKGVLTQKLGPWRRPVAYLSKKLDPVAAGWPPCLRMVAAIAVLRKDAGKLTMGQPLVILAPHAVEALVKQPPDRWLSNARMTHYQAMLLDTDRVQFGPVVALNPATLLPLPEEGAPHDCLEILAETHGTRPDLTDQPIPDADHTWYTDGSSFLQEGQRKAGAAVTTETEVIWARALPAGTSAQRAELIALTQALKMAEGKRLNVYTDSRYAFATAHIHGEIYRRRGLLTSEGREIKNKSEILALLKALFLPKRLSIIHCLGHQKGDSAEARGNRLADQAAREAAIKTPPDTSTLL

SEQ ID NO: 4491 - protein, 671 aa, synthetic construct
TLNLEDEYRLYETSAEPEVSPGSTWLSDFPQAWAETGGMGLAVRQAPLIIPLKATSTPVSIKQYPMSQEAKLGIKPHIQRLLDQGILVPCQSPWNTPLLPVKKPGTNDYRPVQDLREVNKRVEDIHPTVPNPYNLLSGLPPSHRWYTVLDLKDAFFCLRLHPTSQPLFAFEWRDPGMGISGQLTWTRLPQGFKNSPTLFNEALHRDLADFRIQHPDLILLQYVDDILLAATSELDCQQGTRALLLTLGNLGYRASAKKAQLCQKQVKYLGYLLKEGQRWLTEARKETVMGQPTPKTPRQLREFLGTAGFCRLWIPGFAEMAAPLYPLTKPGTLFNWGPDQQKAYQEIKQALLTAPALGLPDLTKPFELFVDEKQGYAKGVLTQKLGPWRRPVAYLSKKLDPVAAGWPPCLRMVAAIAVLRKDAGKLTMGQPLVILAPHAVEALVKQPPDRWLSNARMTHYQAMLLDTDRVQFGPVVALNPATLLPLPEEGAPHDCLEILAETHGTRPDLTDQPIPDADHTWYTDGSSFLQEGQRKAGAAVTTETEVIWARALPAGTSAQRAELIALTQALKMAEGKRLNVYTDSRYAFATAHIHGEIYRRRGWLTSEGREIKNKSEILALLKALFLPKRLSIIHCLGHQKGDSAEARGNRLADQAAREAAIKTPPDTSTLL

SEQ ID NO: 4492 - protein, 671 aa, synthetic construct
TLNLEDEYRLYETSAEPEVSPGSTWLSDFPQAWAETGGMGLAVRQAPLIIPLKATSTPVSIKQYPMSQEAKLGIKPHIQRLLDQGILVPCQSPWNTPLLPVKKPGTNDYRPVQDLREVNKRVEDIHPTVPNPYNLLSGLPPSHRWYTVLDLKDAFFCLRLHPTSQPLFAFEWRDPGMGISGQLTWTRLPQGFKNSPTLFNEALHRDLADFRIQHPDLILLQYVDDILLAATSELDCQQGTRALLLTLGNLGYRASAKKAQLCQKQVKYLGYLLKEGQRWLTEARKETVMGQPTPKTPRQLREFLGKAGFCRLFIPGFAEMAAPLYPLTKPGTLFNWGPDQQKAYQEIKQALLTAPALGLPDLTKPFELFVDEKQGYAKGVLTQKLGPWRRPVAYLSKKLDPVAAGWPPCLRMVAAIAVLRKDAGKLTMGQPLVILAPHAVEALVKQPPDRWLSNARMTHYQAMLLDTDRVQFGPVVALNPATLLPLPEEGAPHDCLEILAETHGTRPDLTDQPIPDADHTWYTDGSSFLQEGQRKAGAAVTTETEVIWARALPAGTSAQRAELIALTQALKMAEGKRLNVYTDSRYAFATAHIHGEIYRRRGWLTSEGREIKNKSEILALLKALFLPKRLSIIHCLGHQKGDSAEARGNRLADQAAREAAIKTPPDTSTLL

SEQ ID NO: 4493 - protein, 671 aa, Murine leukemia virus
TLGIEDEYRLHETSTEPDVSLGSTWLSDFPQAWAETGGMGLAVRQAPLIIPLKATSTPVSIQQYPMSHEARLGIKPHIQRLLDQGILVPCQSPWNTPLLPVKKPGTNDYRPVQDLREVNKRVEDIHPTVPNPYNLLSGLPPSHQWYTVLDLKDAFFCLRLHPTSQPLFAFEWRDPGMGISGQLTWTRLPQGFKNSPTLFDEALHRDLADFRIQHPDLILLQYVDDILLAATSELDCQQGTRALLQTLGDLGYRASAKKAQICQKQVKYLGYLLREGQRWLTEARKETVMGQPVPKTPRQLREFLGTAGFCRLWIPGFAEMAAPLYPLTKTGTLFSWGPDQQKAYQEIKQALLTAPALGLPDLTKPFELFVDEKQGYAKGVLTQKLGPWRRPVAYLSKKLDPVAAGWPPCLRMVAAIAVLTKDAGKLTMGQPLVILAPHAVEALVKQPPDRWLSNARMTHYQAMLLDTDRVQFGPVVALNPATLLPLPEEGAPHDCLEILAETHGTRPDLTDQPIPDADHTWYTDGSSFLQEGQRKAGAAVTTETEVIWAGALPAGTSAQRAELIALTQALKMAEGKRLNVYTDSRYAFATAHIHGEIYRRRGLLTSEGREIKNKSEILALLKALFLPKRLSIIHCLGHQKGDSAEARGNRLADQAAREAAIKTPPDTSTLL

SEQ ID NO: 4494 - protein, 671 aa, synthetic construct
TLGIEDEYRLHETSTEPDVSLGSTWLSDFPQAWAETGGMGLAVRQAPLIIPLKATSTPVSIQQYPMSHEARLGIKPHIQRLLDQGILVPCQSPWNTPLLPVKKPGTNDYRPVQDLREVNKRVEDIHPTVPNPYNLLSGLPPSHQWYTVLDLKDAFFCLRLHPTSQPLFAFEWRDPGMGISGQLTWTRLPQGFKNSPTLFNEALHRDLADFRIQHPDLILLQYVDDILLAATSELDCQQGTRALLQTLGDLGYRASAKKAQICQKQVKYLGYLLREGQRWLTEARKETVMGQPVPKTPRQLREFLGTAGFCRLWIPGFAEMAAPLYPLTKPGTLFSWGPDQQKAYQEIKQALLTAPALGLPDLTKPFELFVDEKQGYAKGVLTQKLGPWRRPVAYLSKKLDPVAAGWPPCLRMVAAIAVLTKDAGKLTMGQPLVILAPHAVEALVKQPPDRWLSNARMTHYQAMLLDTDRVQFGPVVALNPATLLPLPEEGAPHDCLEILAETHGTRPDLTDQPIPDADHTWYTDGSSFLQEGQRKAGAAVTTETEVIWAGALPAGTSAQRAELIALTQALKMAEGKRLNVYTDSRYAFATAHIHGEIYRRRGWLTSEGREIKNKSEILALLKALFLPKRLSIIHCLGHQKGDSAEARGNRLADQAAREAAIKTPPDTSTLL

SEQ ID NO: 4495 - protein, 671 aa, synthetic construct
LGIEDEYRLHETSTEPDVSLGSTWLSDFPQAWAETGGMGLAVRQAPLIIPLKATSTPVSIQQYPMSHEARLGIKPHIQRLLDQGILVPCQSPWNTPLLPVKKPGTNDYRPVQDLREVNKRVEDIHPTVPNPYNLLSGLPPSHQWYTVLDLKDAFFCLRLHPTSQPLFAFEWRDPGMGISGQLTWTRLPQGFKNSPTLFNEALHRDLADFRIQHPDLILLQYVDDILLAATSELDCQQGTRALLQTLGDLGYRASAKKAQICQKQVKYLGYLLREGQRWLTEARKETVMGQPVPKTPRQLREFLGKAGFCRLFIPGFAEMAAPLYPLTKPGTLFSWGPDQQKAYQEIKQALLTAPALGLPDLTKPFELFVDEKQGYAKGVLTQKLGPWRRPVAYLSKKLDPVAAGWPPCLRMVAAIAVLTKDAGKLTMGQPLVILAPHAVEALVKQPPDRWLSNARMTHYQAMLLDTDRVQFGPVVALNPATLLPLPEEGAPHDCLEILAETHGTRPDLTDQPIPDADHTWYTDGSSFLQEGQRKAGAAVTTETEVIWAGALPAGTSAQRAELIALTQALKMAEGKRLNVYTDSRYAFATAHIHGEIYRRRGWLTSEGREIKNKSEILALLKALFLPKRLSIIHCLGHQKGDSAEARGNRLADQAAREAAIKTPPDTSTLLI

SEQ ID NO: 4496 - protein, 671 aa, unidentified
TLNIEDEYRLHETSKEPDVSLGSTWLSDFPQAWAETGGMGLAVRQAPLIIPLKATSTPVSIKQYPMSQEARLGIKPHIQRLLDQGILVPCQSPWNTPLLPVKKPGTNDYRPVQDLREVNKRVEDIHPTVPNPYNLLSGLPPSHQWYTVLDLKDAFFCLRLHPTSQPLFAFEWRDPEMGISGQLTWTRLPQGFKNSPTLFDEALHRDLAGFRIQHPDLILLQYVDDLLLAATSELDCQQGTRALLQTLGDLGYRASAKKAQICQKQVKYLGYLLKEGQRWLTEARKETVMGQPIPKTPRQLREFLGTAGFCRLWIPGFAEMAAPLYPLTKTGTLFNWGPDQQKAFQEIKQALLTAPALGLPDLTKPFELFVDEKQGYAKGVLTQKLGPWRRPVAYLSKKLDPVAAGWPPCLRMVAAIAVLTKDAGKLTMGQPLVILAPHAVEALVKQPPDRWLSNARMTHYQALLLDTDRVQFGPVVALNPATLLPLPEEGLQHDCLDILAEAHGTRSDLMDQPLPDADHTWYTDGSSFLQEGQRKAGAAVTTETEVIWARALPAGTSAQRAELIALTQALKMAEGKKLNVYTDSRYAFATAHIHGEIYRRRGLLTSEGKEIKNKDEILALLKALFLPKRLSIIHCPGHQKGNSAEARGNRMADQAAREVATRETPETSTLL

SEQ ID NO: 4497 - protein, 671 aa, synthetic construct
TLNIEDEYRLHETSKEPDVSLGSTWLSDFPQAWAETGGMGLAVRQAPLIIPLKATSTPVSIKQYPMSQEARLGIKPHIQRLLDQGILVPCQSPWNTPLLPVKKPGTNDYRPVQDLREVNKRVEDIHPTVPNPYNLLSGLPPSHQWYTVLDLKDAFFCLRLHPTSQPLFAFEWRDPEMGISGQLTWTRLPQGFKNSPTLFNEALHRDLAGFRIQHPDLILLQYVDDLLLAATSELDCQQGTRALLQTLGDLGYRASAKKAQICQKQVKYLGYLLKEGQRWLTEARKETVMGQPIPKTPRQLREFLGTAGFCRLWIPGFAEMAAPLYPLTKPGTLFNWGPDQQKAFQEIKQALLTAPALGLPDLTKPFELFVDEKQGYAKGVLTQKLGPWRRPVAYLSKKLDPVAAGWPPCLRMVAAIAVLTKDAGKLTMGQPLVILAPHAVEALVKQPPDRWLSNARMTHYQALLLDTDRVQFGPVVALNPATLLPLPEEGLQHDCLDILAEAHGTRSDLMDQPLPDADHTWYTDGSSFLQEGQRKAGAAVTTETEVIWARALPAGTSAQRAELIALTQALKMAEGKKLNVYTDSRYAFATAHIHGEIYRRRGWLTSEGKEIKNKDEILALLKALFLPKRLSIIHCPGHQKGNSAEARGNRMADQAAREVATRETPETSTLL

SEQ ID NO: 4498 - protein, 671 aa, synthetic construct
TLNIEDEYRLHETSKEPDVSLGSTWLSDFPQAWAETGGMGLAVRQAPLIIPLKATSTPVSIKQYPMSQEARLGIKPHIQRLLDQGILVPCQSPWNTPLLPVKKPGTNDYRPVQDLREVNKRVEDIHPTVPNPYNLLSGLPPSHQWYTVLDLKDAFFCLRLHPTSQPLFAFEWRDPEMGISGQLTWTRLPQGFKNSPTLFNEALHRDLAGFRIQHPDLILLQYVDDLLLAATSELDCQQGTRALLQTLGDLGYRASAKKAQICQKQVKYLGYLLKEGQRWLTEARKETVMGQPIPKTPRQLREFLGKAGFCRLFIPGFAEMAAPLYPLTKPGTLFNWGPDQQKAFQEIKQALLTAPALGLPDLTKPFELFVDEKQGYAKGVLTQKLGPWRRPVAYLSKKLDPVAAGWPPCLRMVAAIAVLTKDAGKLTMGQPLVILAPHAVEALVKQPPDRWLSNARMTHYQALLLDTDRVQFGPVVALNPATLLPLPEEGLQHDCLDILAEAHGTRSDLMDQPLPDADHTWYTDGSSFLQEGQRKAGAAVTTETEVIWARALPAGTSAQRAELIALTQALKMAEGKKLNVYTDSRYAFATAHIHGEIYRRRGWLTSEGKEIKNKDEILALLKALFLPKRLSIIHCPGHQKGNSAEARGNRMADQAAREVATRETPETSTLL

SEQ ID NO: 4499 - protein, 671 aa, unidentified
TLNIEDEYRLHETSKGPDVPLGSTWLSDFPQAWAETGGMGLAFRQAPLIISLKATSTPVSIKQYPMSQEARLGIKPHIQRLLDQGILVPCQSPWNTPLLPVKKPGTNDYRPVQDLREVNKRVEDIHPTVPNPYNLLSGLPPSHQWYTVLDLKDAFFCLRLHPTSQSLFAFEWKDPEMGISGQLTWTRLPQGFKNSPTLFDEALHRDLADFRIQHPDLILLQYVDDLLLAATSELDCQQGTRALLQTLGDLGYRASAKKAQICQKQVKYLGYLLKEGQRWLTEARKETVMGQPTPKTPRQLREFLGTAGLCRLWIPGFAEMAAPLYPLTKTGTLFKWGPDQQKAYQEIKQALLTAPALGLPDLTKPFELFVDEKQGYAKGVLTQKLGPWRRPVAYLSKKLDPVAAGWPPCLRMVAAIAVLTKDVGKLTMGQPLVILAPHAVEALVKQPPDRWLSNARMTHYQALLLDTDRVQFGPIVALNPATLLPLPEEGLQHDCLDILAEAHGTRPDLTDQPLPDADHTWYTDGSSFLQEGQRRAGAAVTTETEVIWAKALPAGTSAQRAELIALTQALKMAAGKKLNVYTDSRYAFATAHIHGEIYRRRGLLTSEGKEIKNKDEILALLKALFLPKRLSIIHCPGHQKGNHAEARGNRMADQAAREVATRETPETSTLL

SEQ ID NO: 4500 - protein, 671 aa, synthetic construct
TLNIEDEYRLHETSKGPDVPLGSTWLSDFPQAWAETGGMGLAFRQAPLIISLKATSTPVSIKQYPMSQEARLGIKPHIQRLLDQGILVPCQSPWNTPLLPVKKPGTNDYRPVQDLREVNKRVEDIHPTVPNPYNLLSGLPPSHQWYTVLDLKDAFFCLRLHPTSQSLFAFEWKDPEMGISGQLTWTRLPQGFKNSPTLFNEALHRDLADFRIQHPDLILLQYVDDLLLAATSELDCQQGTRALLQTLGDLGYRASAKKAQICQKQVKYLGYLLKEGQRWLTEARKETVMGQPTPKTPRQLREFLGTAGLCRLWIPGFAEMAAPLYPLTKPGTLFKWGPDQQKAYQEIKQALLTAPALGLPDLTKPFELFVDEKQGYAKGVLTQKLGPWRRPVAYLSKKLDPVAAGWPPCLRMVAAIAVLTKDVGKLTMGQPLVILAPHAVEALVKQPPDRWLSNARMTHYQALLLDTDRVQFGPIVALNPATLLPLPEEGLQHDCLDILAEAHGTRPDLTDQPLPDADHTWYTDGSSFLQEGQRRAGAAVTTETEVIWAKALPAGTSAQRAELIALTQALKMAAGKKLNVYTDSRYAFATAHIHGEIYRRRGWLTSEGKEIKNKDEILALLKALFLPKRLSIIHCPGHQKGNHAEARGNRMADQAAREVATRETPETSTLL

SEQ ID NO: 4501 - protein, 671 aa, synthetic construct
TLNIEDEYRLHETSKGPDVPLGSTWLSDFPQAWAETGGMGLAFRQAPLIISLKATSTPVSIKQYPMSQEARLGIKPHIQRLLDQGILVPCQSPWNTPLLPVKKPGTNDYRPVQDLREVNKRVEDIHPTVPNPYNLLSGLPPSHQWYTVLDLKDAFFCLRLHPTSQSLFAFEWKDPEMGISGQLTWTRLPQGFKNSPTLFNEALHRDLADFRIQHPDLILLQYVDDLLLAATSELDCQQGTRALLQTLGDLGYRASAKKAQICQKQVKYLGYLLKEGQRWLTEARKETVMGQPTPKTPRQLREFLGKAGLCRLFIPGFAEMAAPLYPLTKPGTLFKWGPDQQKAYQEIKQALLTAPALGLPDLTKPFELFVDEKQGYAKGVLTQKLGPWRRPVAYLSKKLDPVAAGWPPCLRMVAAIAVLTKDVGKLTMGQPLVILAPHAVEALVKQPPDRWLSNARMTHYQALLLDTDRVQFGPIVALNPATLLPLPEEGLQHDCLDILAEAHGTRPDLTDQPLPDADHTWYTDGSSFLQEGQRRAGAAVTTETEVIWAKALPAGTSAQRAELIALTQALKMAAGKKLNVYTDSRYAFATAHIHGEIYRRRGWLTSEGKEIKNKDEILALLKALFLPKRLSIIHCPGHQKGNHAEARGNRMADQAAREVATRETPETSTLL

SEQ ID NO: 4502 - protein, 671 aa, synthetic construct
TLNIEDEYRLHETSKGPDVPLGSTWLSDFPQAWAETGGMGLAVRQAPLIIPLKATSTPVSIKQYPMSQEARLGIKPHIQRLLDQGILVPCQSPWNTPLLPVKKPGTNDYRPVQDLREVNKRVEDIHPTVPNPYNLLSGLPPSHQWYTVLDLKDAFFCLRLHPTSQSLFAFEWRDPEMGISGQLTWTRLPQGFKNSPTLFNEALHRDLADFRIQHPDLILLQYVDDLLLAATSELDCQQGTRALLQTLGDLGYRASAKKAQICQKQVKYLGYLLKEGQRWLTEARKETVMGQPTPKTPRQLREFLGTAGFCRLWIPGFAEMAAPLYPLTKPGTLFEWGPDQQKAYQEIKQALLTAPALGLPDLTKPFELFVDEKQGYAKGVLTQKLGPWRRPVAYLSKKLDPVAAGWPPCLRMVAAIAVLTKDAGKLTMGQPLVILAPHAVEALVKQPPDRWLSNARMTHYQALLLDTDRVQFGPIVALNPATLLPLPEEGLQHDCLDILAEAHGTRPDLTDQPLPDADHTWYTDGSSFLQEGQRKAGAAVTTETEVVWAKALPAGTSAQRAELIALTQALKMAEGKKLNVYTDSRYAFATAHIHGEIYRRRGWLTSEGKEIKNKDEILALLKALFLPKRLSIIHCPGHQKGNRAEARGNRMADQAAREVATRETPETSTLL

SEQ ID NO: 4503 - protein, 671 aa, synthetic construct
TLNIEDEYRLHETSKGPDVPLGSTWLSDFPQAWAETGGMGLAVRQAPLIIPLKATSTPVSIKQYPMSQEARLGIKPHIQRLLDQGILVPCQSPWNTPLLPVKKPGTNDYRPVQDLREVNKRVEDIHPTVPNPYNLLSGLPPSHQWYTVLDLKDAFFCLRLHPTSQSLFAFEWRDPEMGISGQLTWTRLPQGFKNSPTLFNEALHRDLADFRIQHPDLILLQYVDDLLLAATSELDCQQGTRALLQTLGDLGYRASAKKAQICQKQVKYLGYLLKEGQRWLTEARKETVMGQPTPKTPRQLREFLGKAGFCRLFIPGFAEMAAPLYPLTKPGTLFEWGPDQQKAYQEIKQALLTAPALGLPDLTKPFELFVDEKQGYAKGVLTQKLGPWRRPVAYLSKKLDPVAAGWPPCLRMVAAIAVLTKDAGKLTMGQPLVILAPHAVEALVKQPPDRWLSNARMTHYQALLLDTDRVQFGPIVALNPATLLPLPEEGLQHDCLDILAEAHGTRPDLTDQPLPDADHTWYTDGSSFLQEGQRKAGAAVTTETEVVWAKALPAGTSAQRAELIALTQALKMAEGKKLNVYTDSRYAFATAHIHGEIYRRRGWLTSEGKEIKNKDEILALLKALFLPKRLSIIHCPGHQKGNRAEARGNRMADQAAREVATRETPETSTLL

SEQ ID NO: 4504 - protein, 671 aa, synthetic construct
TLNIEDEHRLHETSKEPDVSLGSTWLSDFPQAWAETGGMGLAVRQAPLIIPLKATSTPVSIKQYPMSQEARLGIKPHIQRLLDQGILVPCQSPWNTPLLPVKKPGTNDYRPVQDLREVNKRVEDIHPTVPNPYNLLSGLPPSHQWYTVLDLKDAFFCLRLHPTSQPLFAFEWRDPEMGISGQLTWTRLPQGFKNSPTLFNEALHRDLADFRIQHPDLILLQYVDDLLLAATSELDCQQGTRALLQTLGNLGYRASAKKAQICQKQVKYLGYLLKEGQRWLTEARKETVMGQPTPKTPRQLREFLGTAGFCRLWIPGFAEMAAPLYPLTKPGTLFNWGPDQQKAYQEIKQALLTAPALGLPDLTKPFELFVDEKQGYAKGVLTQKLGPWRRPVAYLSKKLDPVAAGWPPCLRMVAAIAVLTKDAGKLTMGQPLVILAPHAVEALVKQPPDRWLSNARMTHYQALLLDTDRVQFGPVVALNPATLLPLPEEGLQHNCLDILAEAHGTRPDLTDQPLPDADHTWYTDGSSLLQEGQRKAGAAVTTETEVIWAKALPAGTSAQRAELIALTQALKMAEGKKLNVYTDSRYAFATAHIHGEIYRRRGWLTSEGKEIKNKDEILALLKALFLPKRLSIIHCPGHQKGHSAEARGNRMADQAARKAAITETPDTSTLL

SEQ ID NO: 4505 - protein, 671 aa, synthetic construct
TLNIEDEHRLHETSKEPDVSLGSTWLSDFPQAWAETGGMGLAVRQAPLIIPLKATSTPVSIKQYPMSQEARLGIKPHIQRLLDQGILVPCQSPWNTPLLPVKKPGTNDYRPVQDLREVNKRVEDIHPTVPNPYNLLSGLPPSHQWYTVLDLKDAFFCLRLHPTSQPLFAFEWRDPEMGISGQLTWTRLPQGFKNSPTLFNEALHRDLADFRIQHPDLILLQYVDDLLLAATSELDCQQGTRALLQTLGNLGYRASAKKAQICQKQVKYLGYLLKEGQRWLTEARKETVMGQPTPKTPRQLREFLGKAGFCRLFIPGFAEMAAPLYPLTKPGTLFNWGPDQQKAYQEIKQALLTAPALGLPDLTKPFELFVDEKQGYAKGVLTQKLGPWRRPVAYLSKKLDPVAAGWPPCLRMVAAIAVLTKDAGKLTMGQPLVILAPHAVEALVKQPPDRWLSNARMTHYQALLLDTDRVQFGPVVALNPATLLPLPEEGLQHNCLDILAEAHGTRPDLTDQPLPDADHTWYTDGSSLLQEGQRKAGAAVTTETEVIWAKALPAGTSAQRAELIALTQALKMAEGKKLNVYTDSRYAFATAHIHGEIYRRRGWLTSEGKEIKNKDEILALLKALFLPKRLSIIHCPGHQKGHSAEARGNRMADQAARKAAITETPDTSTLL

SEQ ID NO: 4506 - protein, 691 aa, synthetic construct
TLNIEDEYRLHETSKEPDVSLGSTWLSDFPQAWAETGGMGLAVRQAPLIIPLKATSTPVSIKQYPMSQEARLGIKPHIQRLLDQGILVPCQSPWNTPLLPVKKPGTNDYRPVQDLREVNKRVEDIHPTVPNPYNLLSGLPPSHQWYTVLDLKDAFFCLRLHPTSQPLFAFEWRDPEMGISGQLTWTRLPQGFKNSPTLFNEALHRDLADFRIQHPDLILLQYVDDLLLAATSELDCQQGTRALLQTLGNLGYRASAKKAQICQKQVKYLGYLLKEGQRWLTEARKETVMGQPTPKTPRQLREFLGKAGFCRLFIPGFAEMAAPLYPLTKPGTLFNWGPDQQKAYQEIKQALLTAPALGLPDLTKPFELFVDEKQGYAKGVLTQKLGPWRRPVAYLSKKLDPVAAGWPPCLRMVAAIAVLTKDAGKLTMGQPLVILAPHAVEALVKQPPDRWLSNARMTHYQALLLDTDRVQFGPVVALNPATLLPLPEEGLQHNCLDILAEAHGTRPDLTDQPLPDADHTWYTDGSSLLQEGQRKAGAAVTTETEVIWAKALPAGTSAQRAELIALTQALKMAEGKKLNVYTDSRYAFATAHIHGEIYRRRGWLTSEGKEIKNKDEILALLKALFLPKRLSIIHCPGHQKGHSAEARGNRMADQAARKAAITETPDTSTLLIENSSPSGGSKRTADGSEFE

SEQ ID NO: 4507 - protein, 671 aa, unidentified
TLNIEDEYRLHEISTEPDVSPGSTWLSDFPQAWAETGGMGLAVRQAPLIIPLKATSTPVSIKQYPMSQEAKLGIKPHIQRLLDQGILVPCQSPWNTPLLPVKKPGTNDYRPVQGLREVNKRVEDIHPTVPNPYNLLSGLPTSHRWYTVLDLKDAFFCLRLHPTSQPLFASEWRDPGMGISGQLTWTRLPQGFKNSPTLFDEALHRGLADFRIQHPDLILLQYVDDLLLAATSELDCQQGTRALLKTLGNLGYRASAKKAQICQKQVKYLGYLLREGQRWLTEARKETVMGQPTPKTPRQLREFLGTAGFCRLWIPRFAEMAAPLYPLTKTGTLFNWGPDQQKAYHEIKQALLTAPALGLPDLTKPFELFVDEKQGYAKGVLTQKLGPWRRPVAYLSKKLDPVAAGWPPCLRMVAAIAVLTKDAGKLTMGQPLVILAPHAVEALVKQPPDRWLSNARMTHYQAMLLDTDRVQFGPVVALNPATLLPLPEEGAPHDCLEILAETHGTEPDLTDQPIPDADHTWYTDGSSFLQEGQRKAGAAVTTETEVIWARALPAGTSAQRAELIALTQALKMAEGKRLNVYTDSRYAFATAHIHGEIYKRRGLLTSEGREIKNKSEILALLKALFLPKRLSIIHCLGHQKGDSAEARGNRLADQAAREAAIKTPPDTSTLL

SEQ ID NO: 4508 - protein, 671 aa, synthetic construct
TLNIEDEYRLHEISTEPDVSPGSTWLSDFPQAWAETGGMGLAVRQAPLIIPLKATSTPVSIKQYPMSQEAKLGIKPHIQRLLDQGILVPCQSPWNTPLLPVKKPGTNDYRPVQGLREVNKRVEDIHPTVPNPYNLLSGLPTSHRWYTVLDLKDAFFCLRLHPTSQPLFASEWRDPGMGISGQLTWTRLPQGFKNSPTLFNEALHRGLADFRIQHPDLILLQYVDDLLLAATSELDCQQGTRALLKTLGNLGYRASAKKAQICQKQVKYLGYLLREGQRWLTEARKETVMGQPTPKTPRQLREFLGTAGFCRLWIPRFAEMAAPLYPLTKPGTLFNWGPDQQKAYHEIKQALLTAPALGLPDLTKPFELFVDEKQGYAKGVLTQKLGPWRRPVAYLSKKLDPVAAGWPPCLRMVAAIAVLTKDAGKLTMGQPLVILAPHAVEALVKQPPDRWLSNARMTHYQAMLLDTDRVQFGPVVALNPATLLPLPEEGAPHDCLEILAETHGTEPDLTDQPIPDADHTWYTDGSSFLQEGQRKAGAAVTTETEVIWARALPAGTSAQRAELIALTQALKMAEGKRLNVYTDSRYAFATAHIHGEIYKRRGWLTSEGREIKNKSEILALLKALFLPKRLSIIHCLGHQKGDSAEARGNRLADQAAREAAIKTPPDTSTLL

SEQ ID NO: 4509 - protein, 691 aa, Mouse mammary tumor virus
WVQEISDSRPMLHIYLNGRRFLGLLNTGADKTCIAGRDWPANWPIHQTESSLQGLGMACGVARSSQPLRWQHEDKSGIIHPFVIPTLPFTLWGRDIMKDIKVRLMTDSPDDSQDLMIGAIESNLFADQISWKSDQPVWLNQWPLKQEKLQALQQLVTEQLQLGHLEESNSPWNTPVFVIKKKSGKWRLLQDLRAVNATMHDMGALQPGLPSPVAVPKGWEIIIIDLQDCFFNIKLHPEDCKRFAFSVPSPNFKRPYQRFQWKVLPQGMKNSPTLCQKFVDKAILTVRDKYQDSYIVHYMDDILLAHPSRSIVDEILTSMIQALNKHGLVVSTEKIQKYDNLKYLGTHIQGDSVSYQKLQIRTDKLRTLNDFQKLLGNINWIRPFLKLTTGELKPLFEILNGDSNPISTRKLTPEACKALQLMNERLSTARVKRLDLSQPWSLCILKTEYTPTACLWQDGVVEWIHLPHISPKVITPYDIFCTQLIIKGRHRSKELFSKDPDYIVVPYTKVQFDLLLQEKEDWPISLLGFLGEVHFHLPKDPLLTFTLQTAIIFPHMTSTTPLEKGIVIFTDGSANGRSVTYIQGREPIIKENTQNTAQQAEIVAVITAFEEVSQPFNLYTDSKYVTGLFPEIETATLSPRTKIYTELKHLQRLIHKRQEKFYIGHIRGHTGLPGPLAQGNAYADSLTRILT

SEQ ID NO: 4510 - protein, 691 aa, synthetic construct
WVQEISDSRPMLHIYLNGRRFLGLLNTGADKTCIAGRDWPANWPIHQTESSLQGLGMACGVARSSQPLRWQHEDKSGIIHPFVIPTLPFTLWGRDIMKDIKVRLMTDSPDDSQDLMIGAIESNLFADQISWKSDQPVWLNQWPLKQEKLQALQQLVTEQLQLGHLEESNSPWNTPVFVIKKKSGKWRLLQDLRAVNATMHDMGALQPGLPSPVAVPKGWEIIIIDLQDCFFNIKLHPEDCKRFAFSVPSPNFKRPYQRFQWKVLPQGMKNSPTLCQKFVDKAILTVRDKYQDSYIVHYMDDILLAHPSRSIVDEILTSMIQALNKHGLVVSTEKIQKYDNLKYLGTHIQGDSVSYQKLQIRTDKLRTLNDFQKLLGNINWIRPFLKLTTGELKPLFEILNPDSNPISTRKLTPEACKALQLMNERLSTARVKRLDLSQPWSLCILKTEYTPTACLWQDGVVEWIHLPHISPKVITPYDIFCTQLIIKGRHRSKELFSKDPDYIVVPYTKVQFDLLLQEKEDWPISLLGFLGEVHFHLPKDPLLTFTLQTAIIFPHMTSTTPLEKGIVIFTDGSANGRSVTYIQGREPIIKENTQNTAQQAEIVAVITAFEEVSQPFNLYTDSKYVTGLFPEIETATLSPRTKIYTELKHLQRLIHKRQEKFYIGHIRGHTGLPGPLAQGNAYADSLTRILT

SEQ ID NO: 4511 - protein, 691 aa, synthetic construct
VQEISDSRPMLHIYLNGRRFLGLLDTGADKTCIAGRDWPANWPIHQTESSLQGLGMACGVARSSQPLRWQHEDKSGIIHPFVIPTLPFTLWGRDIMKDIKVRLMTDSPDDSQDLMIGAIESNLFADQISWKSDQPVWLNQWPLKQEKLQALQQLVTEQLQLGHLEESNSPWNTPVFVIKKKSGKWRLLQDLRAVNATMHDMGALQPGLPSPVAVPKGWEIIIIDLQDCFFNIKLHPEDCKRFAFSVPSPNFKRPYQRFQWKVLPQGMKNSPTLCQKFVDKAILTVRDKYQDSYIVHYMDDILLAHPSRSIVDEILTSMIQALNKHGLVVSTEKIQKYDNLKYLGTHIQGDSVSYQKLQIRTDKLRTLNDFQKLLGNINWIRPFLKLTTGELKPLFEILNPDSNPISTRKLTPEACKALQLMNERLSTARVKRLDLSQPWSLCILKTEYTPTACLWQDGVVEWIHLPHISPKVITPYDIFCTQLIIKGRHRSKELFSKDPDYIVVPYTKVQFDLLLQEKEDWPISLLGFLGEVHFHLPKDPLLTFTLQTAIIFPHMTSTTPLEKGIVIFTDGSANGRSVTYIQGREPIIKENTQNTAQQAEIVAVITAFEEVSQPFNLYTDSKYVTGLFPEIETATLSPRTKIYTELKHLQRLIHKRQEKFYIGHIRGHTGLPGPLAQGNAYADSLTRILTA

SEQ ID NO: 4512 - protein, 691 aa, synthetic construct
WVQEISDSRPMLHIYLNGRRFLGLLNTGADKTCIAGRDWPANWPIHQTESSLQGLGMACGVARSSQPLRWQHEDKSGIIHPFVIPTLPFTLWGRDIMKDIKVRLMTDSPDDSQDLMIGAIESNLFADQISWKSDQPVWLNQWPLKQEKLQALQQLVTEQLQLGHLEESNSPWNTPVFVIKKKSGKWRLLQDLRAVNATMHDMGALQPGLPSPVAPPKGWEIIIIDLQDCFFNIKLHPEDCKRFAFSVPSPNFKRPYQRFQWKVLPQGMKNSPTLCQKFVDKAILTVRDKYQDSYIVHYMDDILLAHPSRSIVDEILTSMIQALNKHGLVVSTEKIQKYDNLKYLGTHIQGDSVSYQKLQIRTDKLRTLNDFQKLLGNINWIRPFLKLTTGELKPLFEILNPDSNPISTRKLTPEACKALQLMNERLSTARVKRLDLSQPWSLCILKTEYTPTACLWQDGVVEWIHLPHISPKVITPYDIFCTQLIIKGRHRSKELFSKDPDYIVVPYTKVQFDLLLQEKEDWPISLLGFLGEVHFHLPKDPLLTFTLQTAIIFPHMTSTTPLEKGIVIFTDGSANGRSVTYIQGREPIIKENTQNTAQQAEIVAVITAFEEVSQPFNLYTDSKYVTGLFPEIETATLSPRTKIYTELKHLQRLIHKRQEKFYIGHIRGHTGLPGPLAQGNAYADSLTRILT

SEQ ID NO: 4513 - protein, 691 aa, synthetic construct
VQEISDSRPMLHIYLNGRRFLGLLDTGADKTCIAGRDWPANWPIHQTESSLQGLGMACGVARSSQPLRWQHEDKSGIIHPFVIPTLPFTLWGRDIMKDIKVRLMTDSPDDSQDLMIGAIESNLFADQISWKSDQPVWLNQWPLKQEKLQALQQLVTEQLQLGHLEESNSPWNTPVFVIKKKSGKWRLLQDLRAVNATMHDMGALQPGLPSPPAVPKGWEIIIIDLQDCFFNIKLHPEDCKRFAFSVPSPNFKRPYQRFQWKVLPQGMKNSPTLCQKFVDKAILTVRDKYQDSYIVHYMDDILLAHPSRSIVDEILTSMIQALNKHGLVVSTEKIQKYDNLKYLGTHIQGDSVSYQKLQIRTDKLRTLNDFQKLLGNINWIRPFLKLTTGELKPLFEILNPDSNPISTRKLTPEACKALQLMNERLSTARVKRLDLSQPWSLCILKTEYTPTACLWQDGVVEWIHLPHISPKVITPYDIFCTQLIIKGRHRSKELFSKDPDYIVVPYTKVQFDLLLQEKEDWPISLLGFLGEVHFHLPKDPLLTFTLQTAIIFPHMTSTTPLEKGIVIFTDGSANGRSVTYIQGREPIIKENTQNTAQQAEIVAVITAFEEVSQPFNLYTDSKYVTGLFPEIETATLSPRTKIYTELKHLQRLIHKRQEKFYIGHIRGHTGLPGPLAQGNAYADSLTRILTA

SEQ ID NO: 4514 - protein, 691 aa, Mouse mammary tumor virus
VQEISDSRPMLHIYLNGRRFLGLLDTGADKTCIAGRDWPANWPIHQTESSLQGLGMACGVARSSQPLRWQHEDKSGIIHPFVIPTLPFTLWGRDIMKDIKVRLMTDSPDDSQDLMIGAIESNLFADQISWKSDQPVWLNQWPLKQEKLQALQQLVTEQLQLGHLEESNSPWNTPVFVIKKKSGKWRLLQDLRAVNATMHDMGALQPGLPSPVAVPKGWEIIIIDLQDCFFNIKLHPEDCKRFAFSVPSPNFKRPYQRFQWKVLPQGMKNSPTLCQKFVDKAILTVRDKYQDSYIVHYMDDILLAHPSRSIVDEILTSMIQALNKHGLVVSTEKIQKYDNLKYLGTHIQGDSVSYQKLQIRTDKLRTLNDFQKLLGNINWIRPFLKLTTGELKPLFEILNGDSNPISTRKLTPEACKALQLMNERLSTARVKRLDLSQPWSLCILKTEYTPTACLWQDGVVEWIHLPHISPKVITPYDIFCTQLIIKGRHRSKELFSKDPDYIVVPYTKVQFDLLLQEKEDWPISLLGFLGEVHFHLPKDPLLTFTLQTAIIFPHMTSTTPLEKGIVIFTDGSANGRSVTYIQGREPIIKENTQNTAQQAEIVAVITAFEEVSQPFNLYTDSKYVTGLFPEIETATLSPRTKIYTELKHLQRLIHKRQEKFYIGHIRGHTGLPGPLAQGNAYADSLTRILTA

SEQ ID NO: 4515 - protein, 599 aa, Mouse mammary tumor virus
GRDIMKDIKVRLMTDSPDDSQDLMIGAIESNLFADQISWKSDQPVWLNQWPLKQEKLQALQQLVTEQLQLGHLEESNSPWNTPVFVIKKKSGKWRLLQDLRAVNATMHDMGALQPGLPSPVAVPKGWEIIIIDLQDCFFNIKLHPEDCKRFAFSVPSPNFKRPYQRFQWKVLPQGMKNSPTLCQKFVDKAILTVRDKYQDSYIVHYMDDILLAHPSRSIVDEILTSMIQALNKHGLVVSTEKIQKYDNLKYLGTHIQGDSVSYQKLQIRTDKLRTLNDFQKLLGNINWIRPFLKLTTGELKPLFEILNGDSNPISTRKLTPEACKALQLMNERLSTARVKRLDLSQPWSLCILKTEYTPTACLWQDGVVEWIHLPHISPKVITPYDIFCTQLIIKGRHRSKELFSKDPDYIVVPYTKVQFDLLLQEKEDWPISLLGFLGEVHFHLPKDPLLTFTLQTAIIFPHMTSTTPLEKGIVIFTDGSANGRSVTYIQGREPIIKENTQNTAQQAEIVAVITAFEEVSQPFNLYTDSKYVTGLFPEIETATLSPRTKIYTELKHLQRLIHKRQEKFYIGHIRGHTGLPGPLAQGNAYADSLTRILT

SEQ ID NO: 4516 - protein, 599 aa, synthetic construct
GRDIMKDIKVRLMTDSPDDSQDLMIGAIESNLFADQISWKSDQPVWLNQWPLKQEKLQALQQLVTEQLQLGHLEESNSPWNTPVFVIKKKSGKWRLLQDLRAVNATMHDMGALQPGLPSPVAVPKGWEIIIIDLQDCFFNIKLHPEDCKRFAFSVPSPNFKRPYQRFQWKVLPQGMKNSPTLCQKFVDKAILTVRDKYQDSYIVHYMDDILLAHPSRSIVDEILTSMIQALNKHGLVVSTEKIQKYDNLKYLGTHIQGDSVSYQKLQIRTDKLRTLNDFQKLLGNINWIRPFLKLTTGELKPLFEILNPDSNPISTRKLTPEACKALQLMNERLSTARVKRLDLSQPWSLCILKTEYTPTACLWQDGVVEWIHLPHISPKVITPYDIFCTQLIIKGRHRSKELFSKDPDYIVVPYTKVQFDLLLQEKEDWPISLLGFLGEVHFHLPKDPLLTFTLQTAIIFPHMTSTTPLEKGIVIFTDGSANGRSVTYIQGREPIIKENTQNTAQQAEIVAVITAFEEVSQPFNLYTDSKYVTGLFPEIETATLSPRTKIYTELKHLQRLIHKRQEKFYIGHIRGHTGLPGPLAQGNAYADSLTRILT

SEQ ID NO: 4517 - protein, 599 aa, synthetic construct
GRDIMKDIKVRLMTDSPDDSQDLMIGAIESNLFADQISWKSDQPVWLNQWPLKQEKLQALQQLVTEQLQLGHLEESNSPWNTPVFVIKKKSGKWRLLQDLRAVNATMHDMGALQPGLPSPVAPPKGWEIIIIDLQDCFFNIKLHPEDCKRFAFSVPSPNFKRPYQRFQWKVLPQGMKNSPTLCQKFVDKAILTVRDKYQDSYIVHYMDDILLAHPSRSIVDEILTSMIQALNKHGLVVSTEKIQKYDNLKYLGTHIQGDSVSYQKLQIRTDKLRTLNDFQKLLGNINWIRPFLKLTTGELKPLFEILNPDSNPISTRKLTPEACKALQLMNERLSTARVKRLDLSQPWSLCILKTEYTPTACLWQDGVVEWIHLPHISPKVITPYDIFCTQLIIKGRHRSKELFSKDPDYIVVPYTKVQFDLLLQEKEDWPISLLGFLGEVHFHLPKDPLLTFTLQTAIIFPHMTSTTPLEKGIVIFTDGSANGRSVTYIQGREPIIKENTQNTAQQAEIVAVITAFEEVSQPFNLYTDSKYVTGLFPEIETATLSPRTKIYTELKHLQRLIHKRQEKFYIGHIRGHTGLPGPLAQGNAYADSLTRILT

SEQ ID NO: 4518 - protein, 585 aa, Mason-Pfizer monkey virus
LTAAIDILAPQQCAEPITWKSDEPVWVDQWPLTNDKLAAAQQLVQEQLEAGHITESSSPWNTPIFVIKKKSGKWRLLQDLRAVNATMVLMGALQPGLPSPVAIPQGYLKIIIDLKDCFFSIPLHPSDQKRFAFSLPSTNFKEPMQRFQWKVLPQGMANSPTLCQKYVATAIHKVRHAWKQMYIIHYMDDILIAGKDGQQVLQCFDQLKQELTAAGLHIAPEKVQLQDPYTYLGFELNGPKITNQKAVIRKDKLQTLNDFQKLLGDINWLRPYLKLTTGDLKPLFDTLKGDSDPNSHRSLSKEALASLEKVETAIAEQFVTHINYSLPLIFLIFNTALTPTGLFWQDNPIMWIHLPASPKKVLLPYYDAIADLIILGRDHSKKYFGIEPSTIIQPYSKSQIDWLMQNTEMWPIACASFVGILDNHYPPNKLIQFCKLHTFVFPQIISKTPLNNALLVFTDGSSTGMAAYTLTDTTIKFQTNLNSAQLVELQALIAVLSAFPNQPLNIYTDSAYLAHSIPLLETVAQIKHISETAKLFLQCQQLIYNRSIPFYIGHVRAHSGLPGPIAQGNQRADLATKIVASNINT

SEQ ID NO: 4519 - protein, 585 aa, synthetic construct
LTAAIDILAPQQCAEPITWKSDEPVWVDQWPLTNDKLAAAQQLVQEQLEAGHITESSSPWNTPIFVIKKKSGKWRLLQDLRAVNATMVLMGALQPGLPSPVAPPQGYLKIIIDLKDCFFSIPLHPSDQKRFAFSLPSTNFKEPMQRFQWKVLPQGMANSPTLCQKYVATAIHKVRHAWKQMYIIHYMDDILIAGKDGQQVLQCFDQLKQELTAAGLHIAPEKVQLQDPYTYLGFELNGPKITNQKAVIRKDKLQTLNDFQKLLGDINWLRPYLKLTTGDLKPLFDTLKPDSDPNSHRSLSKEALASLEKVETAIAEQFVTHINYSLPLIFLIFNTALTPTGLFWQDNPIMWIHLPASPKKVLLPYYDAIADLIILGRDHSKKYFGIEPSTIIQPYSKSQIDWLMQNTEMWPIACASFVGILDNHYPPNKLIQFCKLHTFVFPQIISKTPLNNALLVFTDGSSTGMAAYTLTDTTIKFQTNLNSAQLVELQALIAVLSAFPNQPLNIYTDSAYLAHSIPLLETVAQIKHISETAKLFLQCQQLIYNRSIPFYIGHVRAHSGLPGPIAQGNQRADLATKIVASNINT

SEQ ID NO: 4520 - protein, 665 aa, unidentified
TLQLDDEYRLYSPLVKPDQNIQFWLEQFPQAWAETAGMGLAKQVPPQVIQLKASATPVSVRQYPLSKEAQEGIRPHVQRLIQQGILVPVQSPWNTPLLPVRKPGTNDYRPVQDLREVNKRVQDIHPTVPNPYNLLCALPPQRSWYTVLDLKDAFFCLRLHPTSQPLFAFEWRDPGTGRTGQLTWTRLPQGFKNSPTIFDEALHRDLANFRIQHPQVTLLQYVDDLLLAGATKQDCLEGTKALLLELSDLGYRASAKKAQICRREVTYLGYSLRDGQRWLTEARKKTVVQIPAPTTAKQVREFLGTAGFCRLWIPGFATLAAPLYPLTKEKGEFSWAPEHQKAFDAIKKALLSAPALALPDVTKPFTLYVDERKGVARGVLTQTLGPWRRPVAYLSKKLDPVASGWPVCLKAIAAVAILVKDADKLTLGQNITVIAPHALENIVRQPPDRWMTNARMTHYQSLLLTERVTFAPPAALNPATLLPEETDEPVTHDCHQLLIEETGVRKDLTDIPLTGEVLTWFTDGSSYVVEGKRMAGAAVVDGTRTIWASSLPEGTSAQKAELMALTQALRLAEGKSINIYTDSRYAFATAHVHGAIYKQRGLLTSAGREIKNKEEILSLLEALHLPKRLAIIHCPGHQKAKDPISRGNQMADRVAKQAAQGVNLL

SEQ ID NO: 4521 - protein, 665 aa, synthetic construct
TLQLDDEYRLYSPLVKPDQNIQFWLEQFPQAWAETAGMGLAKQVPPQVIQLKASATPVSVRQYPLSKEAQEGIRPHVQRLIQQGILVPVQSPWNTPLLPVRKPGTNDYRPVQDLREVNKRVQDIHPTVPNPYNLLCALPPQRSWYTVLDLKDAFFCLRLHPTSQPLFAFEWRDPGTGRTGQLTWTRLPQGFKNSPTIFNEALHRDLANFRIQHPQVTLLQYVDDLLLAGATKQDCLEGTKALLLELSDLGYRASAKKAQICRREVTYLGYSLRDGQRWLTEARKKTVVQIPAPTTAKQVREFLGTAGFCRLWIPGFATLAAPLYPLTKPKGEFSWAPEHQKAFDAIKKALLSAPALALPDVTKPFTLYVDERKGVARGVLTQTLGPWRRPVAYLSKKLDPVASGWPVCLKAIAAVAILVKDADKLTLGQNITVIAPHALENIVRQPPDRWMTNARMTHYQSLLLTERVTFAPPAALNPATLLPEETDEPVTHDCHQLLIEETGVRKDLTDIPLTGEVLTWFTDGSSYVVEGKRMAGAAVVDGTRTIWASSLPEGTSAQKAELMALTQALRLAEGKSINIYTDSRYAFATAHVHGAIYKQRGWLTSAGREIKNKEEILSLLEALHLPKRLAIIHCPGHQKAKDPISRGNQMADRVAKQAAQGVNLL

SEQ ID NO: 4522 - protein, 663 aa, synthetic construct
LDDEYRLYSPLVKPDQNIQFWLEQFPQAWAETAGMGLAKQVPPQVIQLKASATPVSVRQYPLSKEAQEGIRPHVQRLIQQGILVPVQSPWNTPLLPVRKPGTNDYRPVQDLREVNKRVQDIHPTVPNPYNLLCALPPQRSWYTVLDLKDAFFCLRLHPTSQPLFAFEWRDPGTGRTGQLTWTRLPQGFKNSPTIFNEALHRDLANFRIQHPQVTLLQYVDDLLLAGATKQDCLEGTKALLLELSDLGYRASAKKAQICRREVTYLGYSLRDGQRWLTEARKKTVVQIPAPTTAKQVREFLGKAGFCRLFIPGFATLAAPLYPLTKPKGEFSWAPEHQKAFDAIKKALLSAPALALPDVTKPFTLYVDERKGVARGVLTQTLGPWRRPVAYLSKKLDPVASGWPVCLKAIAAVAILVKDADKLTLGQNITVIAPHALENIVRQPPDRWMTNARMTHYQSLLLTERVTFAPPAALNPATLLPEETDEPVTHDCHQLLIEETGVRKDLTDIPLTGEVLTWFTDGSSYVVEGKRMAGAAVVDGTRTIWASSLPEGTSAQKAELMALTQALRLAEGKSINIYTDSRYAFATAHVHGAIYKQRGWLTSAGREIKNKEEILSLLEALHLPKRLAIIHCPGHQKAKDPISRGNQMADRVAKQAAQGVNLLP

SEQ ID NO: 4523 - protein, 751 aa, Macaque simian foamy virus
MDPLQLLQPLEAEIKGTKLKAHWNSGATITCVPEAFLEDERPIQTMLIKTIHGEKQQDVYYLTFKVQGRKVEAEVLASPYDYILLNPSDVPWLMKKPLQLTVLVPLHEYQERLLQQTALPKEQKELLQKLFLKYDALWQHWENQVGHRRIKPHNIATGTLAPRPQKQYPINPKAKPSIQIVIDDLLKQGVLIQQNSTMNTPVYPVPKPDGKWRMVLDYREVNKTIPLIAAQNQHSAGILSSIYRGKYKTTLDLTNGFWAHPITPESYWLTAFTWQGKQYCWTRLPQGFLNSPALFTADVVDLLKEIPNVQAYVDDIYISHDDPQEHLEQLEKIFSILLNAGYVVSLKKSEIAQREVEFLGFNITKEGRGLTDTFKQKLLNITPPKDLKQLQSILGLLNFARNFIPNYSELVKPLYTIVANANGKFISWTEDNSNQLQHIISVLNQADNLEERNPETRLIIKVNSSPSAGYIRYYNEGSKRPIMYVNYIFSKAEAKFTQTEKLLTTMHKGLIKAMDLAMGQEILVYSPIVSMTKIQRTPLPERKALPVRWITWMTYLEDPRIQFHYDKSLPELQQIPNVTEDVIAKTKHPSEFAMVFYTDGSAIKHPDVNKSHSAGMGIAQVQFIPEYKIVHQWSIPLGDHTAQLAEIAAVEFACKKALKISGPVLIVTDSFYVAESANKELPYWKSNGFLNNKKKPLRHVSKWKSIAECLQLKPDIIIMHEKGHQQPMTTLHTEGNNLADKLATQGSYVVH

SEQ ID NO: 4524 - protein, 751 aa, synthetic construct
MDPLQLLQPLEAEIKGTKLKAHWNSGATITCVPEAFLEDERPIQTMLIKTIHGEKQQDVYYLTFKVQGRKVEAEVLASPYDYILLNPSDVPWLMKKPLQLTVLVPLHEYQERLLQQTALPKEQKELLQKLFLKYDALWQHWENQVGHRRIKPHNIATGTLAPRPQKQYPINPKAKPSIQIVIDDLLKQGVLIQQNSTMNTPVYPVPKPDGKWRMVLDYREVNKTIPLIAAQNQHSAGILSSIYRGKYKTTLDLTNGFWAHPITPESYWLTAFTWQGKQYCWTRLPQGFLNSPALFNADVVDLLKEIPNVQAYVDDIYISHDDPQEHLEQLEKIFSILLNAGYVVSLKKSEIAQREVEFLGFNITKEGRGLTDTFKQKLLNITPPKDLKQLQSILGLLNFARNFIPNYSELVKPLYTIVAPANGKFISWTEDNSNQLQHIISVLNQADNLEERNPETRLIIKVNSSPSAGYIRYYNEGSKRPIMYVNYIFSKAEAKFTQTEKLLTTMHKGLIKAMDLAMGQEILVYSPIVSMTKIQRTPLPERKALPVRWITWMTYLEDPRIQFHYDKSLPELQQIPNVTEDVIAKTKHPSEFAMVFYTDGSAIKHPDVNKSHSAGMGIAQVQFIPEYKIVHQWSIPLGDHTAQLAEIAAVEFACKKALKISGPVLIVTDSFYVAESANKELPYWKSNGFLNNKKKPLRHVSKWKSIAECLQLKPDIIIMHEKGHQQPMTTLHTEGNNLADKLATQGSYVVH

SEQ ID NO: 4525 - protein, 751 aa, synthetic construct
MDPLQLLQPLEAEIKGTKLKAHWNSGATITCVPEAFLEDERPIQTMLIKTIHGEKQQDVYYLTFKVQGRKVEAEVLASPYDYILLNPSDVPWLMKKPLQLTVLVPLHEYQERLLQQTALPKEQKELLQKLFLKYDALWQHWENQVGHRRIKPHNIATGTLAPRPQKQYPINPKAKPSIQIVIDDLLKQGVLIQQNSTMNTPVYPVPKPDGKWRMVLDYREVNKTIPLIAAQNQHSAGILSSIYRGKYKTTLDLTNGFWAHPITPESYWLTAFTWQGKQYCWTRLPQGFLNSPALFNADVVDLLKEIPNVQAYVDDIYISHDDPQEHLEQLEKIFSILLNAGYVVSLKKSEIAQREVEFLGFNITKEGRGLTDTFKQKLLNITPPKDLKQLQSILGKLNFARNFIPNYSELVKPLYTIVAPANGKFISWTEDNSNQLQHIISVLNQADNLEERNPETRLIIKVNSSPSAGYIRYYNEGSKRPIMYVNYIFSKAEAKFTQTEKLLTTMHKGLIKAMDLAMGQEILVYSPIVSMTKIQRTPLPERKALPVRWITWMTYLEDPRIQFHYDKSLPELQQIPNVTEDVIAKTKHPSEFAMVFYTDGSAIKHPDVNKSHSAGMGIAQVQFIPEYKIVHQWSIPLGDHTAQLAEIAAVEFACKKALKISGPVLIVTDSFYVAESANKELPYWKSNGFLNNKKKPLRHVSKWKSIAECLQLKPDIIIMHEKGHQQPMTTLHTEGNNLADKLATQGSYVVH

SEQ ID NO: 4526 - protein, 662 aa, Macaque simian foamy virus
VPWLMKKPLQLTVLVPLHEYQERLLQQTALPKEQKELLQKLFLKYDALWQHWENQVGHRRIKPHNIATGTLAPRPQKQYPINPKAKPSIQIVIDDLLKQGVLIQQNSTMNTPVYPVPKPDGKWRMVLDYREVNKTIPLIAAQNQHSAGILSSIYRGKYKTTLDLTNGFWAHPITPESYWLTAFTWQGKQYCWTRLPQGFLNSPALFTADVVDLLKEIPNVQAYVDDIYISHDDPQEHLEQLEKIFSILLNAGYVVSLKKSEIAQREVEFLGFNITKEGRGLTDTFKQKLLNITPPKDLKQLQSILGLLNFARNFIPNYSELVKPLYTIVANANGKFISWTEDNSNQLQHIISVLNQADNLEERNPETRLIIKVNSSPSAGYIRYYNEGSKRPIMYVNYIFSKAEAKFTQTEKLLTTMHKGLIKAMDLAMGQEILVYSPIVSMTKIQRTPLPERKALPVRWITWMTYLEDPRIQFHYDKSLPELQQIPNVTEDVIAKTKHPSEFAMVFYTDGSAIKHPDVNKSHSAGMGIAQVQFIPEYKIVHQWSIPLGDHTAQLAEIAAVEFACKKALKISGPVLIVTDSFYVAESANKELPYWKSNGFLNNKKKPLRHVSKWKSIAECLQLKPDIIIMHEKGHQQPMTTLHTEGNNLADKLATQGSYVVH

SEQ ID NO: 4527 - protein, 662 aa, synthetic construct
VPWLMKKPLQLTVLVPLHEYQERLLQQTALPKEQKELLQKLFLKYDALWQHWENQVGHRRIKPHNIATGTLAPRPQKQYPINPKAKPSIQIVIDDLLKQGVLIQQNSTMNTPVYPVPKPDGKWRMVLDYREVNKTIPLIAAQNQHSAGILSSIYRGKYKTTLDLTNGFWAHPITPESYWLTAFTWQGKQYCWTRLPQGFLNSPALFNADVVDLLKEIPNVQAYVDDIYISHDDPQEHLEQLEKIFSILLNAGYVVSLKKSEIAQREVEFLGFNITKEGRGLTDTFKQKLLNITPPKDLKQLQSILGLLNFARNFIPNYSELVKPLYTIVAPANGKFISWTEDNSNQLQHIISVLNQADNLEERNPETRLIIKVNSSPSAGYIRYYNEGSKRPIMYVNYIFSKAEAKFTQTEKLLTTMHKGLIKAMDLAMGQEILVYSPIVSMTKIQRTPLPERKALPVRWITWMTYLEDPRIQFHYDKSLPELQQIPNVTEDVIAKTKHPSEFAMVFYTDGSAIKHPDVNKSHSAGMGIAQVQFIPEYKIVHQWSIPLGDHTAQLAEIAAVEFACKKALKISGPVLIVTDSFYVAESANKELPYWKSNGFLNNKKKPLRHVSKWKSIAECLQLKPDIIIMHEKGHQQPMTTLHTEGNNLADKLATQGSYVVH

SEQ ID NO: 4528 - protein, 662 aa, synthetic construct
VPWLMKKPLQLTVLVPLHEYQERLLQQTALPKEQKELLQKLFLKYDALWQHWENQVGHRRIKPHNIATGTLAPRPQKQYPINPKAKPSIQIVIDDLLKQGVLIQQNSTMNTPVYPVPKPDGKWRMVLDYREVNKTIPLIAAQNQHSAGILSSIYRGKYKTTLDLTNGFWAHPITPESYWLTAFTWQGKQYCWTRLPQGFLNSPALFNADVVDLLKEIPNVQAYVDDIYISHDDPQEHLEQLEKIFSILLNAGYVVSLKKSEIAQREVEFLGFNITKEGRGLTDTFKQKLLNITPPKDLKQLQSILGKLNFARNFIPNYSELVKPLYTIVAPANGKFISWTEDNSNQLQHIISVLNQADNLEERNPETRLIIKVNSSPSAGYIRYYNEGSKRPIMYVNYIFSKAEAKFTQTEKLLTTMHKGLIKAMDLAMGQEILVYSPIVSMTKIQRTPLPERKALPVRWITWMTYLEDPRIQFHYDKSLPELQQIPNVTEDVIAKTKHPSEFAMVFYTDGSAIKHPDVNKSHSAGMGIAQVQFIPEYKIVHQWSIPLGDHTAQLAEIAAVEFACKKALKISGPVLIVTDSFYVAESANKELPYWKSNGFLNNKKKPLRHVSKWKSIAECLQLKPDIIIMHEKGHQQPMTTLHTEGNNLADKLATQGSYVVH

SEQ ID NO: 4529 - protein, 751 aa, unidentified
MDPLQLLQPLEAEIKGTKLKAHWNSGATITCVPQAFLEEEVPIKNIWIKTIHGEKEQPVYYLTFKIQGRKVEAEVISSPYDYILVSPSDIPWLMKKPLQLTTLVPLQEYEERLLKQTMLTGSYKEKLQSLFLKYDALWQHWENQVGHRRIKPHHIATGTVNPRPQKQYPINPKAKASIQTVINDLLKQGVLIQQNSIMNTPVYPVPKPDGKWRMVLDYREVNKTIPLIAAQNQHSAGILSSIFRGKYKTTLDLSNGFWAHSITPESYWLTAFTWLGQQYCWTRLPQGFLNSPALFTADVVDLLKEVPNVQVYVDDIYISHDDPREHLEQLEKVFSLLLNAGYVVSLKKSEIAQHEVEFLGFNITKEGRGLTETFKQKLLNITPPRDLKQLQSILGLLNFARNFIPNFSELVKPLYNIIATANGKYITWTTDNSQQLQNIISMLNSAENLEERNPEVRLIMKVNTSPSAGYIRFYNEFAKRPIMYLNYVYTKAEVKFTNTEKLLTTIHKGLIKALDLGMGQEILVYSPIVSMTKIQKTPLPERKALPIRWITWMSYLEDPRIQFHYDKTLPELQQVPTVTDDIIAKIKHPSEFSMVFYTDGSAIKHPNVNKSHNAGMGIAQVQFKPEFTVINTWSIPLGDHTAQLAEVAAVEFACKKALKIDGPVLIVTDSFYVAESVNKELPYWQSNGFFNNKKKPLKHVSKWKSIADCIQLKPDIIIIHEKGHQPTASTFHTEGNNLADKLATQGSYVVN

SEQ ID NO: 4530 - protein, 751 aa, synthetic construct
MDPLQLLQPLEAEIKGTKLKAHWNSGATITCVPQAFLEEEVPIKNIWIKTIHGEKEQPVYYLTFKIQGRKVEAEVISSPYDYILVSPSDIPWLMKKPLQLTTLVPLQEYEERLLKQTMLTGSYKEKLQSLFLKYDALWQHWENQVGHRRIKPHHIATGTVNPRPQKQYPINPKAKASIQTVINDLLKQGVLIQQNSIMNTPVYPVPKPDGKWRMVLDYREVNKTIPLIAAQNQHSAGILSSIFRGKYKTTLDLSNGFWAHSITPESYWLTAFTWLGQQYCWTRLPQGFLNSPALFNADVVDLLKEVPNVQVYVDDIYISHDDPREHLEQLEKVFSLLLNAGYVVSLKKSEIAQHEVEFLGFNITKEGRGLTETFKQKLLNITPPRDLKQLQSILGLLNFARNFIPNFSELVKPLYNIIATAPGKYITWTTDNSQQLQNIISMLNSAENLEERNPEVRLIMKVNTSPSAGYIRFYNEFAKRPIMYLNYVYTKAEVKFTNTEKLLTTIHKGLIKALDLGMGQEILVYSPIVSMTKIQKTPLPERKALPIRWITWMSYLEDPRIQFHYDKTLPELQQVPTVTDDIIAKIKHPSEFSMVFYTDGSAIKHPNVNKSHNAGMGIAQVQFKPEFTVINTWSIPLGDHTAQLAEVAAVEFACKKALKIDGPVLIVTDSFYVAESVNKELPYWQSNGFFNNKKKPLKHVSKWKSIADCIQLKPDIIIIHEKGHQPTASTFHTEGNNLADKLATQGSYVVN

SEQ ID NO: 4531 - protein, 751 aa, synthetic construct
MDPLQLLQPLEAEIKGTKLKAHWNSGATITCVPQAFLEEEVPIKNIWIKTIHGEKEQPVYYLTFKIQGRKVEAEVISSPYDYILVSPSDIPWLMKKPLQLTTLVPLQEYEERLLKQTMLTGSYKEKLQSLFLKYDALWQHWENQVGHRRIKPHHIATGTVNPRPQKQYPINPKAKASIQTVINDLLKQGVLIQQNSIMNTPVYPVPKPDGKWRMVLDYREVNKTIPLIAAQNQHSAGILSSIFRGKYKTTLDLSNGFWAHSITPESYWLTAFTWLGQQYCWTRLPQGFLNSPALFNADVVDLLKEVPNVQVYVDDIYISHDDPREHLEQLEKVFSLLLNAGYVVSLKKSEIAQHEVEFLGFNITKEGRGLTETFKQKLLNITPPRDLKQLQSILGKLNFARNFIPNFSELVKPLYNIIATAPGKYITWTTDNSQQLQNIISMLNSAENLEERNPEVRLIMKVNTSPSAGYIRFYNEFAKRPIMYLNYVYTKAEVKFTNTEKLLTTIHKGLIKALDLGMGQEILVYSPIVSMTKIQKTPLPERKALPIRWITWMSYLEDPRIQFHYDKTLPELQQVPTVTDDIIAKIKHPSEFSMVFYTDGSAIKHPNVNKSHNAGMGIAQVQFKPEFTVINTWSIPLGDHTAQLAEVAAVEFACKKALKIDGPVLIVTDSFYVAESVNKELPYWQSNGFFNNKKKPLKHVSKWKSIADCIQLKPDIIIIHEKGHQPTASTFHTEGNNLADKLATQGSYVVN

SEQ ID NO: 4532 - protein, 662 aa, unidentified
IPWLMKKPLQLTTLVPLQEYEERLLKQTMLTGSYKEKLQSLFLKYDALWQHWENQVGHRRIKPHHIATGTVNPRPQKQYPINPKAKASIQTVINDLLKQGVLIQQNSIMNTPVYPVPKPDGKWRMVLDYREVNKTIPLIAAQNQHSAGILSSIFRGKYKTTLDLSNGFWAHSITPESYWLTAFTWLGQQYCWTRLPQGFLNSPALFTADVVDLLKEVPNVQVYVDDIYISHDDPREHLEQLEKVFSLLLNAGYVVSLKKSEIAQHEVEFLGFNITKEGRGLTETFKQKLLNITPPRDLKQLQSILGLLNFARNFIPNFSELVKPLYNIIATANGKYITWTTDNSQQLQNIISMLNSAENLEERNPEVRLIMKVNTSPSAGYIRFYNEFAKRPIMYLNYVYTKAEVKFTNTEKLLTTIHKGLIKALDLGMGQEILVYSPIVSMTKIQKTPLPERKALPIRWITWMSYLEDPRIQFHYDKTLPELQQVPTVTDDIIAKIKHPSEFSMVFYTDGSAIKHPNVNKSHNAGMGIAQVQFKPEFTVINTWSIPLGDHTAQLAEVAAVEFACKKALKIDGPVLIVTDSFYVAESVNKELPYWQSNGFFNNKKKPLKHVSKWKSIADCIQLKPDIIIIHEKGHQPTASTFHTEGNNLADKLATQGSYVVN

SEQ ID NO: 4533 - protein, 662 aa, synthetic construct
IPWLMKKPLQLTTLVPLQEYEERLLKQTMLTGSYKEKLQSLFLKYDALWQHWENQVGHRRIKPHHIATGTVNPRPQKQYPINPKAKASIQTVINDLLKQGVLIQQNSIMNTPVYPVPKPDGKWRMVLDYREVNKTIPLIAAQNQHSAGILSSIFRGKYKTTLDLSNGFWAHSITPESYWLTAFTWLGQQYCWTRLPQGFLNSPALFNADVVDLLKEVPNVQVYVDDIYISHDDPREHLEQLEKVFSLLLNAGYVVSLKKSEIAQHEVEFLGFNITKEGRGLTETFKQKLLNITPPRDLKQLQSILGLLNFARNFIPNFSELVKPLYNIIATAPGKYITWTTDNSQQLQNIISMLNSAENLEERNPEVRLIMKVNTSPSAGYIRFYNEFAKRPIMYLNYVYTKAEVKFTNTEKLLTTIHKGLIKALDLGMGQEILVYSPIVSMTKIQKTPLPERKALPIRWITWMSYLEDPRIQFHYDKTLPELQQVPTVTDDIIAKIKHPSEFSMVFYTDGSAIKHPNVNKSHNAGMGIAQVQFKPEFTVINTWSIPLGDHTAQLAEVAAVEFACKKALKIDGPVLIVTDSFYVAESVNKELPYWQSNGFFNNKKKPLKHVSKWKSIADCIQLKPDIIIIHEKGHQPTASTFHTEGNNLADKLATQGSYVVN

SEQ ID NO: 4534 - protein, 662 aa, synthetic construct
IPWLMKKPLQLTTLVPLQEYEERLLKQTMLTGSYKEKLQSLFLKYDALWQHWENQVGHRRIKPHHIATGTVNPRPQKQYPINPKAKASIQTVINDLLKQGVLIQQNSIMNTPVYPVPKPDGKWRMVLDYREVNKTIPLIAAQNQHSAGILSSIFRGKYKTTLDLSNGFWAHSITPESYWLTAFTWLGQQYCWTRLPQGFLNSPALFNADVVDLLKEVPNVQVYVDDIYISHDDPREHLEQLEKVFSLLLNAGYVVSLKKSEIAQHEVEFLGFNITKEGRGLTETFKQKLLNITPPRDLKQLQSILGKLNFARNFIPNFSELVKPLYNIIATAPGKYITWTTDNSQQLQNIISMLNSAENLEERNPEVRLIMKVNTSPSAGYIRFYNEFAKRPIMYLNYVYTKAEVKFTNTEKLLTTIHKGLIKALDLGMGQEILVYSPIVSMTKIQKTPLPERKALPIRWITWMSYLEDPRIQFHYDKTLPELQQVPTVTDDIIAKIKHPSEFSMVFYTDGSAIKHPNVNKSHNAGMGIAQVQFKPEFTVINTWSIPLGDHTAQLAEVAAVEFACKKALKIDGPVLIVTDSFYVAESVNKELPYWQSNGFFNNKKKPLKHVSKWKSIADCIQLKPDIIIIHEKGHQPTASTFHTEGNNLADKLATQGSYVVN

SEQ ID NO: 4535 - protein, 751 aa, Simian foamy virus
MNPLQLLQPLPAEVKGTKLLAHWNSGATITCIPESFLEDEQPIKQTLIKTIHGEKQQNVYYLTFKVKGRKVEAEVIASPYEYILLSPTDVPWLTQQPLQLTILVPLQEYQDRILNKTALPEEQKQQLKALFTKYDNLWQHWENQVGHRKIRPHNIATGDYPPRPQKQYPINPKAKPSIQIVIDDLLKQGVLTPQNSTMNTPVYPVPKPDGRWRMVLDYREVNKTIPLTAAQNQHSAGILATIVRQKYKTTLDLANGFWAHPITPDSYWLTAFTWQGKQYCWTRLPQGFLNSPALFTADAVDLLKEVPNVQVYVDDIYLSHDNPHEHIQQLEKVFQILLQAGYVVSLKKSEIGQRTVEFLGFNITKEGRGLTDTFKTKLLNVTPPKDLKQLQSILGLLNFARNFIPNFAELVQTLYNLIASSKGKYIEWTEDNTKQLNKVIEALNTASNLEERLPDQRLVIKVNTSPSAGYVRYYNESGKKPIMYLNYVFSKAELKFSMLEKLLTTMHKALIKAMDLAMGQEILVYSPIVSMTKIQKTPLPERKALPIRWITWMTYLEDPRIQFHYDKTLPELKHIPDVYTSSIPPLKHPSQYEGVFCTDGSAIKSPDPTKSNNAGMGIVHAIYNPEYKILNQWSIPLGHHTAQMAEIAAVEFACKKALKVPGPVLVITDSFYVAESANKELPYWKSNGFVNNKKEPLKHISKWKSIAECLSIKPDITIQHEKGHQPINTSIHTEGNALADKLATQGSYVVN

SEQ ID NO: 4536 - protein, 751 aa, synthetic construct
MNPLQLLQPLPAEVKGTKLLAHWNSGATITCIPESFLEDEQPIKQTLIKTIHGEKQQNVYYLTFKVKGRKVEAEVIASPYEYILLSPTDVPWLTQQPLQLTILVPLQEYQDRILNKTALPEEQKQQLKALFTKYDNLWQHWENQVGHRKIRPHNIATGDYPPRPQKQYPINPKAKPSIQIVIDDLLKQGVLTPQNSTMNTPVYPVPKPDGRWRMVLDYREVNKTIPLTAAQNQHSAGILATIVRQKYKTTLDLANGFWAHPITPDSYWLTAFTWQGKQYCWTRLPQGFLNSPALFNADAVDLLKEVPNVQVYVDDIYLSHDNPHEHIQQLEKVFQILLQAGYVVSLKKSEIGQRTVEFLGFNITKEGRGLTDTFKTKLLNVTPPKDLKQLQSILGLLNFARNFIPNFAELVQTLYNLIASSPGKYIEWTEDNTKQLNKVIEALNTASNLEERLPDQRLVIKVNTSPSAGYVRYYNESGKKPIMYLNYVFSKAELKFSMLEKLLTTMHKALIKAMDLAMGQEILVYSPIVSMTKIQKTPLPERKALPIRWITWMTYLEDPRIQFHYDKTLPELKHIPDVYTSSIPPLKHPSQYEGVFCTDGSAIKSPDPTKSNNAGMGIVHAIYNPEYKILNQWSIPLGHHTAQMAEIAAVEFACKKALKVPGPVLVITDSFYVAESANKELPYWKSNGFVNNKKEPLKHISKWKSIAECLSIKPDITIQHEKGHQPINTSIHTEGNALADKLATQGSYVVN

SEQ ID NO: 4537 - protein, 751 aa, synthetic construct
MNPLQLLQPLPAEVKGTKLLAHWNSGATITCIPESFLEDEQPIKQTLIKTIHGEKQQNVYYLTFKVKGRKVEAEVIASPYEYILLSPTDVPWLTQQPLQLTILVPLQEYQDRILNKTALPEEQKQQLKALFTKYDNLWQHWENQVGHRKIRPHNIATGDYPPRPQKQYPINPKAKPSIQIVIDDLLKQGVLTPQNSTMNTPVYPVPKPDGRWRMVLDYREVNKTIPLTAAQNQHSAGILATIVRQKYKTTLDLANGFWAHPITPDSYWLTAFTWQGKQYCWTRLPQGFLNSPALFNADAVDLLKEVPNVQVYVDDIYLSHDNPHEHIQQLEKVFQILLQAGYVVSLKKSEIGQRTVEFLGFNITKEGRGLTDTFKTKLLNVTPPKDLKQLQSILGKLNFARNFIPNFAELVQTLYNLIASSPGKYIEWTEDNTKQLNKVIEALNTASNLEERLPDQRLVIKVNTSPSAGYVRYYNESGKKPIMYLNYVFSKAELKFSMLEKLLTTMHKALIKAMDLAMGQEILVYSPIVSMTKIQKTPLPERKALPIRWITWMTYLEDPRIQFHYDKTLPELKHIPDVYTSSIPPLKHPSQYEGVFCTDGSAIKSPDPTKSNNAGMGIVHAIYNPEYKILNQWSIPLGHHTAQMAEIAAVEFACKKALKVPGPVLVITDSFYVAESANKELPYWKSNGFVNNKKEPLKHISKWKSIAECLSIKPDITIQHEKGHQPINTSIHTEGNALADKLATQGSYVVN

SEQ ID NO: 4538 - protein, 662 aa, Simian foamy virus
VPWLTQQPLQLTILVPLQEYQDRILNKTALPEEQKQQLKALFTKYDNLWQHWENQVGHRKIRPHNIATGDYPPRPQKQYPINPKAKPSIQIVIDDLLKQGVLTPQNSTMNTPVYPVPKPDGRWRMVLDYREVNKTIPLTAAQNQHSAGILATIVRQKYKTTLDLANGFWAHPITPDSYWLTAFTWQGKQYCWTRLPQGFLNSPALFTADAVDLLKEVPNVQVYVDDIYLSHDNPHEHIQQLEKVFQILLQAGYVVSLKKSEIGQRTVEFLGFNITKEGRGLTDTFKTKLLNVTPPKDLKQLQSILGLLNFARNFIPNFAELVQTLYNLIASSKGKYIEWTEDNTKQLNKVIEALNTASNLEERLPDQRLVIKVNTSPSAGYVRYYNESGKKPIMYLNYVFSKAELKFSMLEKLLTTMHKALIKAMDLAMGQEILVYSPIVSMTKIQKTPLPERKALPIRWITWMTYLEDPRIQFHYDKTLPELKHIPDVYTSSIPPLKHPSQYEGVFCTDGSAIKSPDPTKSNNAGMGIVHAIYNPEYKILNQWSIPLGHHTAQMAEIAAVEFACKKALKVPGPVLVITDSFYVAESANKELPYWKSNGFVNNKKEPLKHISKWKSIAECLSIKPDITIQHEKGHQPINTSIHTEGNALADKLATQGSYVVN

SEQ ID NO: 4539 - protein, 662 aa, synthetic construct
VPWLTQQPLQLTILVPLQEYQDRILNKTALPEEQKQQLKALFTKYDNLWQHWENQVGHRKIRPHNIATGDYPPRPQKQYPINPKAKPSIQIVIDDLLKQGVLTPQNSTMNTPVYPVPKPDGRWRMVLDYREVNKTIPLTAAQNQHSAGILATIVRQKYKTTLDLANGFWAHPITPDSYWLTAFTWQGKQYCWTRLPQGFLNSPALFNADAVDLLKEVPNVQVYVDDIYLSHDNPHEHIQQLEKVFQILLQAGYVVSLKKSEIGQRTVEFLGFNITKEGRGLTDTFKTKLLNVTPPKDLKQLQSILGLLNFARNFIPNFAELVQTLYNLIASSPGKYIEWTEDNTKQLNKVIEALNTASNLEERLPDQRLVIKVNTSPSAGYVRYYNESGKKPIMYLNYVFSKAELKFSMLEKLLTTMHKALIKAMDLAMGQEILVYSPIVSMTKIQKTPLPERKALPIRWITWMTYLEDPRIQFHYDKTLPELKHIPDVYTSSIPPLKHPSQYEGVFCTDGSAIKSPDPTKSNNAGMGIVHAIYNPEYKILNQWSIPLGHHTAQMAEIAAVEFACKKALKVPGPVLVITDSFYVAESANKELPYWKSNGFVNNKKEPLKHISKWKSIAECLSIKPDITIQHEKGHQPINTSIHTEGNALADKLATQGSYVVN

SEQ ID NO: 4540 - protein, 662 aa, synthetic construct
VPWLTQQPLQLTILVPLQEYQDRILNKTALPEEQKQQLKALFTKYDNLWQHWENQVGHRKIRPHNIATGDYPPRPQKQYPINPKAKPSIQIVIDDLLKQGVLTPQNSTMNTPVYPVPKPDGRWRMVLDYREVNKTIPLTAAQNQHSAGILATIVRQKYKTTLDLANGFWAHPITPDSYWLTAFTWQGKQYCWTRLPQGFLNSPALFNADAVDLLKEVPNVQVYVDDIYLSHDNPHEHIQQLEKVFQILLQAGYVVSLKKSEIGQRTVEFLGFNITKEGRGLTDTFKTKLLNVTPPKDLKQLQSILGKLNFARNFIPNFAELVQTLYNLIASSPGKYIEWTEDNTKQLNKVIEALNTASNLEERLPDQRLVIKVNTSPSAGYVRYYNESGKKPIMYLNYVFSKAELKFSMLEKLLTTMHKALIKAMDLAMGQEILVYSPIVSMTKIQKTPLPERKALPIRWITWMTYLEDPRIQFHYDKTLPELKHIPDVYTSSIPPLKHPSQYEGVFCTDGSAIKSPDPTKSNNAGMGIVHAIYNPEYKILNQWSIPLGHHTAQMAEIAAVEFACKKALKVPGPVLVITDSFYVAESANKELPYWKSNGFVNNKKEPLKHISKWKSIAECLSIKPDITIQHEKGHQPINTSIHTEGNALADKLATQGSYVVN

SEQ ID NO: 4541 - protein, 592 aa, Squirrel monkey retrovirus
PRSRAIDIPVPHADKISWKITDPVWVDQWPLTYEKTLAAIALVQEQLAAGHIEPTNSPWNTPIFIIKKKSGSWRLLQDLRAVNKVMVPMGALQPGLPSPVAIPLNYHKIVIDLKDCFFTIPLHPEDRPYFAFSVPQINFQSPMPRYQWKVLPQGMANSPTLCQKFVAAAIAPVRSQWPEAYILHYMDDILLACDSAEAAKACYAHIISCLTSYGLKIAPDKVQVSEPFSYLGFELHHQQVFTPRVCLKTDHLKTLNDFQKLLGDIQWLRPYLKLPTSALVPLNNILKGDPNPLSVRALTPEAKQSLALINKAIQNQSVQQISYNLPLVLLLLPTPHTPTAVFWQPNGTDPTKNGSPLLWLHLPASPSKVLLTYPSLLAMLIIKGRYTGRQLFGRDPHSIIIPYTQDQLTWLLQTSDEWAIALSSFTGDIDNHYPSDPVIQFAKLHQFIFPKITKCAPIPQATLVFTDGSSNGIAAYVIDNQPISIKSPYLSAQLVELYAILQVFTVLAHQPFNLYTDSAYIAQSVPLLETVPFIKSSTNATPLFSKLQQLILNRQHPFFIGHLRAHLNLPGPLAEGNALADAATQIFPIISD

SEQ ID NO: 4542 - protein, 592 aa, synthetic construct
PRSRAIDIPVPHADKISWKITDPVWVDQWPLTYEKTLAAIALVQEQLAAGHIEPTNSPWNTPIFIIKKKSGSWRLLQDLRAVNKVMVPMGALQPGLPSPVAIPLNYHKIVIDLKDCFFTIPLHPEDRPYFAFSVPQINFQSPMPRYQWKVLPQGMANSPTLCQKFVAAAIAPVRSQWPEAYILHYMDDILLACDSAEAAKACYAHIISCLTSYGLKIAPDKVQVSEPFSYLGFELHHQQVFTPRVCLKTDHLKTLNDFQKLLGDIQWLRPYLKLPTSALVPLNNILKPDPNPLSVRALTPEAKQSLALINKAIQNQSVQQISYNLPLVLLLLPTPHTPTAVFWQPNGTDPTKNGSPLLWLHLPASPSKVLLTYPSLLAMLIIKGRYTGRQLFGRDPHSIIIPYTQDQLTWLLQTSDEWAIALSSFTGDIDNHYPSDPVIQFAKLHQFIFPKITKCAPIPQATLVFTDGSSNGIAAYVIDNQPISIKSPYLSAQLVELYAILQVFTVLAHQPFNLYTDSAYIAQSVPLLETVPFIKSSTNATPLFSKLQQLILNRQHPFFIGHLRAHLNLPGPLAEGNALADAATQIFPIISD

SEQ ID NO: 4543 - protein, 592 aa, synthetic construct
PRSRAIDIPVPHADKISWKITDPVWVDQWPLTYEKTLAAIALVQEQLAAGHIEPTNSPWNTPIFIIKKKSGSWRLLQDLRAVNKVMVPMGALQPGLPSPVAPPLNYHKIVIDLKDCFFTIPLHPEDRPYFAFSVPQINFQSPMPRYQWKVLPQGMANSPTLCQKFVAAAIAPVRSQWPEAYILHYMDDILLACDSAEAAKACYAHIISCLTSYGLKIAPDKVQVSEPFSYLGFELHHQQVFTPRVCLKTDHLKTLNDFQKLLGDIQWLRPYLKLPTSALVPLNNILKPDPNPLSVRALTPEAKQSLALINKAIQNQSVQQISYNLPLVLLLLPTPHTPTAVFWQPNGTDPTKNGSPLLWLHLPASPSKVLLTYPSLLAMLIIKGRYTGRQLFGRDPHSIIIPYTQDQLTWLLQTSDEWAIALSSFTGDIDNHYPSDPVIQFAKLHQFIFPKITKCAPIPQATLVFTDGSSNGIAAYVIDNQPISIKSPYLSAQLVELYAILQVFTVLAHQPFNLYTDSAYIAQSVPLLETVPFIKSSTNATPLFSKLQQLILNRQHPFFIGHLRAHLNLPGPLAEGNALADAATQIFPIISD

SEQ ID NO: 4544 - protein, 585 aa, unidentified
LATAVDILAPQRYADPITWKSDEPVWVDQWPLTQEKLAAAQQLVQEQLQAGHIIESNSPWNTPIFVIKKKSGKWRLLQDLRAVNATMVLMGALQPGLPSPVAIPQGYFKIVIDLKDCFFTIPLQPVDQKRFAFSLPSTNFKQPMKRYQWKVLPQGMANSPTLCQKYVAAAIEPVRKSWAQMYIIHYMDDILIAGKLGEQVLQCFAQLKQALTTTGLQIAPEKVQLQDPYTYLGFQINGPKITNQKAVIRRDKLQTLNDFQKLLGDINWLRPYLHLTTGDLKPLFDILKGDSNPNSPRSLSEAALASLQKVETAIAEQFVTQIDYTQPLTFLIFNTTLTPTGLFWQNNPVMWVHLPASPKKVLLPYYDAIADLIILGRDNSKKYFGLEPSTIIQPYSKSQIHWLMQNTETWPIACASYAGNIDNHYPPNKLIQFCKLHAVVFPRIISKTPLDNALLVFTDGSSTGIAAYTFEKTTVRFKTSHTSAQLVELQALIAVLSAFPHRALNVYTDSAYLAHSIPLLETVSHIKHISDTAKFFLQCQQLIYNRSIPFYLGHIRAHSGLPGPLSQGNHITDLATKVVATTLTT

SEQ ID NO: 4545 - protein, 585 aa, synthetic construct
LATAVDILAPQRYADPITWKSDEPVWVDQWPLTQEKLAAAQQLVQEQLQAGHIIESNSPWNTPIFVIKKKSGKWRLLQDLRAVNATMVLMGALQPGLPSPVAPPQGYFKIVIDLKDCFFTIPLQPVDQKRFAFSLPSTNFKQPMKRYQWKVLPQGMANSPTLCQKYVAAAIEPVRKSWAQMYIIHYMDDILIAGKLGEQVLQCFAQLKQALTTTGLQIAPEKVQLQDPYTYLGFQINGPKITNQKAVIRRDKLQTLNDFQKLLGDINWLRPYLHLTTGDLKPLFDILKGDSNPNSPRSLSEAALASLQKVETAIAEQFVTQIDYTQPLTFLIFNTTLTPTGLFWQNNPVMWVHLPASPKKVLLPYYDAIADLIILGRDNSKKYFGLEPSTIIQPYSKSQIHWLMQNTETWPIACASYAGNIDNHYPPNKLIQFCKLHAVVFPRIISKTPLDNALLVFTDGSSTGIAAYTFEKTTVRFKTSHTSAQLVELQALIAVLSAFPHRALNVYTDSAYLAHSIPLLETVSHIKHISDTAKFFLQCQQLIYNRSIPFYLGHIRAHSGLPGPLSQGNHITDLATKVVATTLTT

SEQ ID NO: 4546 - protein, 650 aa, Walleye dermal sarcoma virus
SCQTKNTLNIDEYLLQFPDQLWASLPTDIGRMLVPPITIKIKDNASLPSIRQYPLPKDKTEGLRPLISSLENQGILIKCHSPCNTPIFPIKKAGRDEYRMIHDLRAINNIVAPLTAVVASPTTVLSNLAPSLHWFTVIDLSNAFFSVPIHKDSQYLFAFTFEGHQYTWTVLPQGFIHSPTLFSQALYQSLHKIKFKISSEICIYMDDVLIASKDRDTNLKDTAVMLQHLASEGHKVSKKKLQLCQQEVVYLGQLLTPEGRKILPDRKVTVSQFQQPTTIRQIRAFLGLVGYCRHWIPEFSIHSKFLEKQLKKDTAEPFQLDDQQVEAFNKLKHAITTAPVLVVPDPAKPFQLYTSHSEHASIAVLTQKHAGRTRPIAFLSSKFDAIESGLPPCLKACASIHRSLTQADSFILGAPLIIYTTHAICTLLQRDRSQLVTASRFSKWEADLLRPELTFVACSAVSPAHLYMQSCENNIPPHDCVLLTHTISRPRPDLSDLPIPDPDMTLFSDGSYTTGRGGAAVVMHRPVTDDFIIIHQQPGGASAQTAELLALAAACHLATDKTVNIYTDSRYAYGVVHDFGHLWMHRGFVTSAGTPIKNHKEIEYLLKQIMKPKQVSVIKIEAHTKGVSMEVRGNAAADEAAKNAVFLVQR

SEQ ID NO: 4547 - protein, 650 aa, synthetic construct
SCQTKNTLNIDEYLLQFPDQLWASLPTDIGRMLVPPITIKIKDNASLPSIRQYPLPKDKTEGLRPLISSLENQGILIKCHSPCNTPIFPIKKAGRDEYRMIHDLRAINNIVAPLTAVVASPTTVLSNLAPSLHWFTVIDLSNAFFSVPIHKDSQYLFAFTFEGHQYTWTVLPQGFIHSPTLFNQALYQSLHKIKFKISSEICIYMDDVLIASKDRDTNLKDTAVMLQHLASEGHKVSKKKLQLCQQEVVYLGQLLTPEGRKILPDRKVTVSQFQQPTTIRQIRAFLGLVGYCRHWIPEFSIHSKFLEKQLKPDTAEPFQLDDQQVEAFNKLKHAITTAPVLVVPDPAKPFQLYTSHSEHASIAVLTQKHAGRTRPIAFLSSKFDAIESGLPPCLKACASIHRSLTQADSFILGAPLIIYTTHAICTLLQRDRSQLVTASRFSKWEADLLRPELTFVACSAVSPAHLYMQSCENNIPPHDCVLLTHTISRPRPDLSDLPIPDPDMTLFSDGSYTTGRGGAAVVMHRPVTDDFIIIHQQPGGASAQTAELLALAAACHLATDKTVNIYTDSRYAYGVVHDFGHLWMHRGFVTSAGTPIKNHKEIEYLLKQIMKPKQVSVIKIEAHTKGVSMEVRGNAAADEAAKNAVFLVQR

SEQ ID NO: 4548 - protein, 650 aa, synthetic construct
SCQTKNTLNIDEYLLQFPDQLWASLPTDIGRMLVPPITIKIKDNASLPSIRQYPLPKDKTEGLRPLISSLENQGILIKCHSPCNTPIFPIKKAGRDEYRMIHDLRAINNIVAPLTAVVASPTTVLSNLAPSLHWFTVIDLSNAFFSVPIHKDSQYLFAFTFEGHQYTWTVLPQGFIHSPTLFNQALYQSLHKIKFKISSEICIYMDDVLIASKDRDTNLKDTAVMLQHLASEGHKVSKKKLQLCQQEVVYLGQLLTPEGRKILPDRKVTVSQFQQPTTIRQIRAFLGKVGYCRHFIPEFSIHSKFLEKQLKPDTAEPFQLDDQQVEAFNKLKHAITTAPVLVVPDPAKPFQLYTSHSEHASIAVLTQKHAGRTRPIAFLSSKFDAIESGLPPCLKACASIHRSLTQADSFILGAPLIIYTTHAICTLLQRDRSQLVTASRFSKWEADLLRPELTFVACSAVSPAHLYMQSCENNIPPHDCVLLTHTISRPRPDLSDLPIPDPDMTLFSDGSYTTGRGGAAVVMHRPVTDDFIIIHQQPGGASAQTAELLALAAACHLATDKTVNIYTDSRYAYGVVHDFGHLWMHRGFVTSAGTPIKNHKEIEYLLKQIMKPKQVSVIKIEAHTKGVSMEVRGNAAADEAAKNAVFLVQR

SEQ ID NO: 4549 - protein, 669 aa, Woolly monkey sarcoma virus
VLNLEEEYRLHEKPVPSSIDPSWLQLFPTVWAERAGMGLANQVPPVVVELRSGASPVAVRQYPMSKEAREGIRPHIQRFLDLGVLVPCQSPWNTPLLPVKKPGTNDYRPVQDLREINKRVQDIHPTVPNPYNLLSSLPPSHTWYSVLDLKDAFFCLKLHPNSQPLFAFEWRDPEKGNTGQLTWTRLPQGFKNSPTLFDEALHRDLAPFRALNPQVVLLQYVDDLLVAAPTYRDCKEGTQKLLQELSKLGYRVSAKKAQLCQKEVTYLGYLLKEGKRWLTPARKATVMKIPPPTTPRQVREFLGTAGFCRLWIPGFASLAAPLYPLTKESIPFIWTEEHQKAFDRIKEALLSAPALALPDLTKPFTLYVDERAGVARGVLTQTLGPWRRPVAYLSKKLDPVASGWPTCLKAVAAVALLLKDADKLTLGQNVTVIASHSLESIVRQPPDRWMTNARMTHYQSLLLNERVSFAPPAVLNPATLLPVESEATPVHRCSEILAEETGTRRDLKDQPLPGVPAWYTDGSSFIAEGKRRAGAAIVDGKRTVWASSLPEGTSAQKAELVALTQALRLAEGKDINIYTDSRYAFATAHIHGAIYKQRGLLTSAGKDIKNKEEILALLEAIHLPKRVAIIHCPGHQKGNDPVATGNRRADEAAKQAALSTRVLAETTKP

SEQ ID NO: 4550 - protein, 669 aa, synthetic construct
VLNLEEEYRLHEKPVPSSIDPSWLQLFPTVWAERAGMGLANQVPPVVVELRSGASPVAVRQYPMSKEAREGIRPHIQRFLDLGVLVPCQSPWNTPLLPVKKPGTNDYRPVQDLREINKRVQDIHPTVPNPYNLLSSLPPSHTWYSVLDLKDAFFCLKLHPNSQPLFAFEWRDPEKGNTGQLTWTRLPQGFKNSPTLFNEALHRDLAPFRALNPQVVLLQYVDDLLVAAPTYRDCKEGTQKLLQELSKLGYRVSAKKAQLCQKEVTYLGYLLKEGKRWLTPARKATVMKIPPPTTPRQVREFLGTAGFCRLWIPGFASLAAPLYPLTKPSIPFIWTEEHQKAFDRIKEALLSAPALALPDLTKPFTLYVDERAGVARGVLTQTLGPWRRPVAYLSKKLDPVASGWPTCLKAVAAVALLLKDADKLTLGQNVTVIASHSLESIVRQPPDRWMTNARMTHYQSLLLNERVSFAPPAVLNPATLLPVESEATPVHRCSEILAEETGTRRDLKDQPLPGVPAWYTDGSSFIAEGKRRAGAAIVDGKRTVWASSLPEGTSAQKAELVALTQALRLAEGKDINIYTDSRYAFATAHIHGAIYKQRGWLTSAGKDIKNKEEILALLEAIHLPKRVAIIHCPGHQKGNDPVATGNRRADEAAKQAALSTRVLAETTKP

SEQ ID NO: 4551 - protein, 669 aa, synthetic construct
VLNLEEEYRLHEKPVPSSIDPSWLQLFPTVWAERAGMGLANQVPPVVVELRSGASPVAVRQYPMSKEAREGIRPHIQRFLDLGVLVPCQSPWNTPLLPVKKPGTNDYRPVQDLREINKRVQDIHPTVPNPYNLLSSLPPSHTWYSVLDLKDAFFCLKLHPNSQPLFAFEWRDPEKGNTGQLTWTRLPQGFKNSPTLFNEALHRDLAPFRALNPQVVLLQYVDDLLVAAPTYRDCKEGTQKLLQELSKLGYRVSAKKAQLCQKEVTYLGYLLKEGKRWLTPARKATVMKIPPPTTPRQVREFLGKAGFCRLFIPGFASLAAPLYPLTKPSIPFIWTEEHQKAFDRIKEALLSAPALALPDLTKPFTLYVDERAGVARGVLTQTLGPWRRPVAYLSKKLDPVASGWPTCLKAVAAVALLLKDADKLTLGQNVTVIASHSLESIVRQPPDRWMTNARMTHYQSLLLNERVSFAPPAVLNPATLLPVESEATPVHRCSEILAEETGTRRDLKDQPLPGVPAWYTDGSSFIAEGKRRAGAAIVDGKRTVWASSLPEGTSAQKAELVALTQALRLAEGKDINIYTDSRYAFATAHIHGAIYKQRGWLTSAGKDIKNKEEILALLEAIHLPKRVAIIHCPGHQKGNDPVATGNRRADEAAKQAALSTRVLAETTKP

SEQ ID NO: 4552 - protein, 671 aa, unidentified
TLNIEDEYRLHETSKEPDVPLGSTWLSDFPQAWAETGGMGLAVRQAPLIIPLKATSTPVSIKQYPMSQEARLGIKPHIQRLLDQGILVPCQSPWNTPLLPVKKPGTNDYRPVQDLREVNKRVEDIHPTVPNPYNLLSGLPPSHQWYTVLDLKDAFFCLRLHPTSQPLFAFEWRDPEMGISGQLTWTRLPQGFKNSPTLFDEALHRDLADFRIQHPDLILLQYVDDLLLAATSEQDCQRGTRALLQTLGNLGYRASAKKAQICQKQVKYLGYLLKEGQRWLTEARKETVMGQPTPKTPRQLREFLGTAGFCRLWIPGFAEMAAPLYPLTKTGTLFNWGPDQQKAYQEIKQALLTAPALGLPDLTKPFELFVDEKQGYAKGVLTQKLGPWRRPVAYLSKKLDPVAAGWPPCLRMVAAIAVLTKDAGKLTMGQPLVILAPHAVEALVKQPPDRWLSNARMTHYQAMLLDTDRVQFGPVVALNPATLLPLPEKEAPHDCLEILAETHGTRPDLTDQPIPDADYTWYTDGSSFLQEGQRRAGAAVTTETEVIWARALPAGTSAQRAELIALTQALKMAEGKKLNVYTDSRYAFATAHVHGEIYRRRGLLTSEGREIKNKNEILALLKALFLPKRLSIIHCPGHQKGNSAEARGNRMADQAAREAAMKAVLETSTLL

SEQ ID NO: 4553 - protein, 671 aa, synthetic construct
TLNIEDEYRLHETSKEPDVPLGSTWLSDFPQAWAETGGMGLAVRQAPLIIPLKATSTPVSIKQYPMSQEARLGIKPHIQRLLDQGILVPCQSPWNTPLLPVKKPGTNDYRPVQDLREVNKRVEDIHPTVPNPYNLLSGLPPSHQWYTVLDLKDAFFCLRLHPTSQPLFAFEWRDPEMGISGQLTWTRLPQGFKNSPTLFNEALHRDLADFRIQHPDLILLQYVDDLLLAATSEQDCQRGTRALLQTLGNLGYRASAKKAQICQKQVKYLGYLLKEGQRWLTEARKETVMGQPTPKTPRQLREFLGTAGFCRLWIPGFAEMAAPLYPLTKPGTLFNWGPDQQKAYQEIKQALLTAPALGLPDLTKPFELFVDEKQGYAKGVLTQKLGPWRRPVAYLSKKLDPVAAGWPPCLRMVAAIAVLTKDAGKLTMGQPLVILAPHAVEALVKQPPDRWLSNARMTHYQAMLLDTDRVQFGPVVALNPATLLPLPEKEAPHDCLEILAETHGTRPDLTDQPIPDADYTWYTDGSSFLQEGQRRAGAAVTTETEVIWARALPAGTSAQRAELIALTQALKMAEGKKLNVYTDSRYAFATAHVHGEIYRRRGWLTSEGREIKNKNEILALLKALFLPKRLSIIHCPGHQKGNSAEARGNRMADQAAREAAMKAVLETSTLL

SEQ ID NO: 4554 - protein, 671 aa, synthetic construct
TLNIEDEYRLHETSKEPDVPLGSTWLSDFPQAWAETGGMGLAVRQAPLIIPLKATSTPVSIKQYPMSQEARLGIKPHIQRLLDQGILVPCQSPWNTPLLPVKKPGTNDYRPVQDLREVNKRVEDIHPTVPNPYNLLSGLPPSHQWYTVLDLKDAFFCLRLHPTSQPLFAFEWRDPEMGISGQLTWTRLPQGFKNSPTLFNEALHRDLADFRIQHPDLILLQYVDDLLLAATSEQDCQRGTRALLQTLGNLGYRASAKKAQICQKQVKYLGYLLKEGQRWLTEARKETVMGQPTPKTPRQLREFLGKAGFCRLFIPGFAEMAAPLYPLTKPGTLFNWGPDQQKAYQEIKQALLTAPALGLPDLTKPFELFVDEKQGYAKGVLTQKLGPWRRPVAYLSKKLDPVAAGWPPCLRMVAAIAVLTKDAGKLTMGQPLVILAPHAVEALVKQPPDRWLSNARMTHYQAMLLDTDRVQFGPVVALNPATLLPLPEKEAPHDCLEILAETHGTRPDLTDQPIPDADYTWYTDGSSFLQEGQRRAGAAVTTETEVIWARALPAGTSAQRAELIALTQALKMAEGKKLNVYTDSRYAFATAHVHGEIYRRRGWLTSEGREIKNKNEILALLKALFLPKRLSIIHCPGHQKGNSAEARGNRMADQAAREAAMKAVLETSTLL

SEQ ID NO: 4555 - protein, 9 aa, unidentified
LAGLIDADG

SEQ ID NO: 4556 - protein, 1082 aa, Neisseria meningitidis
MAAFKPNPINYILGLDIGIASVGWAMVEIDEEENPIRLIDLGVRVFERAEVPKTGDSLAMARRLARSVRRLTRRRAHRLLRARRLLKREGVLQAADFDENGLIKSLPNTPWQLRAAALDRKLTPLEWSAVLLHLIKHRGYLSQRKNEGETADKELGALLKGVANNAHALQTGDFRTPAELALNKFEKESGHIRNQRGDYSHTFSRKDLQAELILLFEKQKEFGNPHVSGGLKEGIETLLMTQRPALSGDAVQKMLGHCTFEPAEPKAAKNTYTAERFIWLTKLNNLRILEQGSERPLTDTERATLMDEPYRKSKLTYAQARKLLGLEDTAFFKGLRYGKDNAEASTLMEMKAYHAISRALEKEGLKDKKSPLNLSSELQDEIGTAFSLFKTDEDITGRLKDRVQPEILEALLKHISFDKFVQISLKALRRIVPLMEQGKRYDEACAEIYGDHYGKKNTEEKIYLPPIPADEIRNPVVLRALSQARKVINGVVRRYGSPARIHIETAREVGKSFKDRKEIEKRQEENRKDREKAAAKFREYFPNFVGEPKSKDILKLRLYEQQHGKCLYSGKEINLVRLNEKGYVEIDHALPFSRTWDDSFNNKVLVLGSENQNKGNQTPYEYFNGKDNSREWQEFKARVETSRFPRSKKQRILLQKFDEDGFKECNLNDTRYVNRFLCQFVADHILLTGKGKRRVFASNGQITNLLRGFWGLRKVRAENDRHHALDAVVVACSTVAMQQKITRFVRYKEMNAFDGKTIDKETGKVLHQKTHFPQPWEFFAQEVMIRVFGKPDGKPEFEEADTPEKLRTLLAEKLSSRPEAVHEYVTPLFVSRAPNRKMSGAHKDTLRSAKRFVKHNEKISVKRVWLTEIKLADLENMVNYKNGREIELYEALKARLEAYGGNAKQAFDPKDNPFYKKGGQLVKAVRVEKTQESGVLLNKKNAYTIADNGDMVRVDVFCKVDKKGKNQYFIVPIYAWQVAENILPDIDCKGYRIDDSYTFCFSLHKYDLIAFQKDEKSKVEFAYYINCDSSNGRFYLAWHDKGSKEQQFRISTQNLVLIQKYQVNELGKEIRPCRLKKRPPVR

SEQ ID NO: 4557 - protein, 1055 aa, Pasteurella pneumotropica
MQNNPLNYILGLDLGIASIGWAVVEIDEESSPIRLIDVGVRTFERAEVAKTGESLALSRRLARSSRRLIKRRAERLKKAKRLLKAEKILHSIDEKLPINVWQLRVKGLKEKLERQEWAAVLLHLSKHRGYLSQRKNEGKSDNKELGALLSGIASNHQMLQSSEYRTPAEIAVKKFQVEEGHIRNQRGSYTHTFSRLDLLAEMELLFQRQAELGNSYTSTTLLENLTALLMWQKPALAGDAILKMLGKCTFEPSEYKAAKNSYSAERFVWLTKLNNLRILENGTERALNDNERFALLEQPYEKSKLTYAQVRAMLALSDNAIFKGVRYLGEDKKTVESKTTLIEMKFYHQIRKTLGSAELKKEWNELKGNSDLLDEIGTAFSLYKTDDDICRYLEGKLPERVLNALLENLNFDKFIQLSLKALHQILPLMLQGQRYDEAVSAIYGDHYGKKSTETTRLLPTIPADEIRNPVVLRTLTQARKVINAVVRLYGSPARIHIETAREVGKSYQDRKKLEKQQEDNRKQRESAVKKFKEMFPHFVGEPKGKDILKMRLYELQQAKCLYSGKSLELHRLLEKGYVEVDHALPFSRTWDDSFNNKVLVLANENQNKGNLTPYEWLDGKNNSERWQHFVVRVQTSGFSYAKKQRILNHKLDEKGFIERNLNDTRYVARFLCNFIADNMLLVGKGKRNVFASNGQITALLRHRWGLQKVREQNDRHHALDAVVVACSTVAMQQKITRFVRYNEGNVFSGERIDRETGEIIPLHFPSPWAFFKENVEIRIFSENPKLELENRLPDYPQYNHEWVQPLFVSRMPTRKMTGQGHMETVKSAKRLNEGLSVLKVPLTQLKLSDLERMVNRDREIALYESLKARLEQFGNDPAKAFAEPFYKKGGALVKAVRLEQTQKSGVLVRDGNGVADNASMVRVDVFTKGGKYFLVPIYTWQVAKGILPNRAATQGKDENDWDIMDEMATFQFSLCQNDLIKLVTKKKTIFGYFNGLNRATSNINIKEHDLDKSKGKLGIYLEVGVKLAISLEKYQVDELGKNIRPCRPTKRQHVR

SEQ ID NO: 4558 - protein, 1053 aa, Staphylococcus aureus
MKRNYILGLDIGITSVGYGIIDYETRDVIDAGVRLFKEANVENNEGRRSKRGARRLKRRRRHRIQRVKKLLFDYNLLTDHSELSGINPYEARVKGLSQKLSEEEFSAALLHLAKRRGVHNVNEVEEDTGNELSTKEQISRNSKALEEKYVAELQLERLKKDGEVRGSINRFKTSDYVKEAKQLLKVQKAYHQLDQSFIDTYIDLLETRRTYYEGPGEGSPFGWKDIKEWYEMLMGHCTYFPEELRSVKYAYNADLYNALNDLNNLVITRDENEKLEYYEKFQIIENVFKQKKKPTLKQIAKEILVNEEDIKGYRVTSTGKPEFTNLKVYHDIKDITARKEIIENAELLDQIAKILTIYQSSEDIQEELTNLNSELTQEEIEQISNLKGYTGTHNLSLKAINLILDELWHTNDNQIAIFNRLKLVPKKVDLSQQKEIPTTLVDDFILSPVVKRSFIQSIKVINAIIKKYGLPNDIIIELAREKNSKDAQKMINEMQKRNRQTNERIEEIIRTTGKENAKYLIEKIKLHDMQEGKCLYSLEAIPLEDLLNNPFNYEVDHIIPRSVSFDNSFNNKVLVKQEENSKKGNRTPFQYLSSSDSKISYETFKKHILNLAKGKGRISKTKKEYLLEERDINRFSVQKDFINRNLVDTRYATRGLMNLLRSYFRVNNLDVKVKSINGGFTSFLRRKWKFKKERNKGYKHHAEDALIIANADFIFKEWKKLDKAKKVMENQMFEEKQAESMPEIETEQEYKEIFITPHQIKHIKDFKDYKYSHRVDKKPNRELINDTLYSTRKDDKGNTLIVNNLNGLYDKDNDKLKKLINKSPEKLLMYHHDPQTYQKLKLIMEQYGDEKNPLYKYYEETGNYLTKYSKKDNGPVIKKIKYYGNKLNAHLDITDDYPNSRNKVVKLSLKPYRFDVYLDNGVYKFVTVKNLDVIKKENYYEVNSKCYEEAKKLKKISNQAEFIASFYNNDLIKINGELYRVIGVNNDLLNRIEVNMIDITYREYLENMNDKRPPRIIKTIASKTQSIKKYSTDILGNLYEVKSKKHPQIIKKG

SEQ ID NO: 4559 - protein, 1053 aa, Staphylococcus aureus
MKRNYILGLDIGITSVGYGIIDYETRDVIDAGVRLFKEANVENNEGRRSKRGARRLKRRRRHRIQRVKKLLFDYNLLTDHSELSGINPYEARVKGLSQKLSEEEFSAALLHLAKRRGVHNVNEVEEDTGNELSTKEQISRNSKALEEKYVAELQLERLKKDGEVRGSINRFKTSDYVKEAKQLLKVQKAYHQLDQSFIDTYIDLLETRRTYYEGPGEGSPFGWKDIKEWYEMLMGHCTYFPEELRSVKYAYNADLYNALNDLNNLVITRDENEKLEYYEKFQIIENVFKQKKKPTLKQIAKEILVNEEDIKGYRVTSTGKPEFTNLKVYHDIKDITARKEIIENAELLDQIAKILTIYQSSEDIQEELTNLNSELTQEEIEQISNLKGYTGTHNLSLKAINLILDELWHTNDNQIAIFNRLKLVPKKVDLSQQKEIPTTLVDDFILSPVVKRSFIQSIKVINAIIKKYGLPNDIIIELAREKNSKDAQKMINEMQKRNRQTNERIEEIIRTTGKENAKYLIEKIKLHDMQEGKCLYSLEAIPLEDLLNNPFNYEVDHIIPRSVSFDNSFNNKVLVKQEENSKKGNRTPFQYLSSSDSKISYETFKKHILNLAKGKGRISKTKKEYLLEERDINRFSVQKDFINRNLVDTRYATRGLMNLLRSYFRVNNLDVKVKSINGGFTSFLRRKWKFKKERNKGYKHHAEDALIIANADFIFKEWKKLDKAKKVMENQMFEEKQAESMPEIETEQEYKEIFITPHQIKHIKDFKDYKYSHRVDKKPNRKLINDTLYSTRKDDKGNTLIVNNLNGLYDKDNDKLKKLINKSPEKLLMYHHDPQTYQKLKLIMEQYGDEKNPLYKYYEETGNYLTKYSKKDNGPVIKKIKYYGNKLNAHLDITDDYPNSRNKVVKLSLKPYRFDVYLDNGVYKFVTVKNLDVIKKENYYEVNSKCYEEAKKLKKISNQAEFIASFYKNDLIKINGELYRVIGVNNDLLNRIEVNMIDITYREYLENMNDKRPPHIIKTIASKTQSIKKYSTDILGNLYEVKSKKHPQIIKKG

SEQ ID NO: 4560 - protein, 1061 aa, Staphylococcus auricularis
MQENQQKQNYILGLDIGITSVGYGLIDSKTREVIDAGVRLFPEADSENNSNRRSKRGARRLKRRRIHRLNRVKDLLADYQMIDLNNVPKSTDPYTIRVKGLREPLTKEEFAIALLHIAKRRGLHNISVSMGDEEQDNELSTKQQLQKNAQQLQDKYVCELQLERLTNINKVRGEKNRFKTEDFVKEVKQLCETQRQYHNIDDQFIQQYIDLVSTRREYFEGPGNGSPYGWDGDLLKWYEKLMGRCTYFPEELRSVKYAYSADLFNALNDLNNLVVTRDDNPKLEYYEKYHIIENVFKQKKNPTLKQIAKEIGVQDYDIRGYRITKSGKPQFTSFKLYHDLKNIFEQAKYLEDVEMLDEIAKILTIYQDEISIKKALDQLPELLTESEKSQIAQLTGYTGTHRLSLKCIHIVIDELWESPENQMEIFTRLNLKPKKVEMSEIDSIPTTLVDEFILSPVVKRAFIQSIKVINAVINRFGLPEDIIIELAREKNSKDRRKFINKLQKQNEATRKKIEQLLAKYGNTNAKYMIEKIKLHDMQEGKCLYSLEAIPLEDLLSNPTHYEVDHIIPRSVSFDNSLNNKVLVKQSENSKKGNRTPYQYLSSNESKISYNQFKQHILNLSKAKDRISKKKRDMLLEERDINKFEVQKEFINRNLVDTRYATRELSNLLKTYFSTHDYAVKVKTINGGFTNHLRKVWDFKKHRNHGYKHHAEDALVIANADFLFKTHKALRRTDKILEQPGLEVNDTTVKVDTEEKYQELFETPKQVKNIKQFRDFKYSHRVDKKPNRQLINDTLYSTREIDGETYVVQTLKDLYAKDNEKVKKLFTERPQKILMYQHDPKTFEKLMTILNQYAEAKNPLAAYYEDKGEYVTKYAKKGNGPAIHKIKYIDKKLGSYLDVSNKYPETQNKLVKLSLKSFRFDIYKCEQGYKMVSIGYLDVLKKDNYYYIPKDKYEAEKQKKKIKESDLFVGSFYYNDLIMYEDELFRVIGVNSDINNLVELNMVDITYKDFCEVNNVTGEKRIKKTIGKRVVLIEKYTTDILGNLYKTPLPKKPQLIFKRGEL

SEQ ID NO: 4561 - protein, 1061 aa, Staphylococcus auricularis
MQENQQKQNYILGLDIGITSVGYGLIDSKTREVIDAGVRLFPEADSENNSNRRSKRGARRLKRRRIHRLNRVKDLLADYQMIDLNNVPKSTDPYTIRVKGLREPLTKEEFAIALLHIAKRRGLHNISVSMGDEEQDNELSTKQQLQKNAQQLQDKYVCELQLERLTNINKVRGEKNRFKTEDFVKEVKQLCETQRQYHNIDDQFIQQYIDLVSTRREYFEGPGNGSPYGWDGDLLKWYEKLMGRCTYFPEELRSVKYAYSADLFNALNDLNNLVVTRDDNPKLEYYEKYHIIENVFKQKKNPTLKQIAKEIGVQDYDIRGYRITKSGKPQFTSFKLYHDLKNIFEQAKYLEDVEMLDEIAKILTIYQDEISIKKALDQLPELLTESEKSQIAQLTGYTGTHRLSLKCIHIVIDELWESPENQMEIFTRLNLKPKKVEMSEIDSIPTTLVDEFILSPVVKRAFIQSIKVINAVINRFGLPEDIIIELAREKNSKDRRKFINKLQKQNEATRKKIEQLLAKYGNTNAKYMIEKIKLHDMQEGKCLYSLEAIPLEDLLSNPTHYEVDHIIPRSVSFDNSLNNKVLVKQSENSKKGNRTPYQYLSSNESKISYNQFKQHILNLSKAKDRISKKKRDMLLEERDINKFEVQKEFINRNLVDTRYATRELSNLLKTYFSTHDYAVKVKTINGGFTNHLRKVWDFKKHRNHGYKHHAEDALVIANADFLFKTHKALRRTDKILEQPGLEVNDTTVKVDTEEKYQELFETPKQVKNIKQFRDFKYSHRVDKKPNRKLINDTLYSTREIDGETYVVQTLKDLYAKDNEKVKKLFTERPQKILMYQHDPKTFEKLMTILNQYAEAKNPLAAYYEDKGEYVTKYAKKGNGPAIHKIKYIDKKLGSYLDVSNKYPETQNKLVKLSLKSFRFDIYKCEQGYKMVSIGYLDVLKKDNYYYIPKDKYEAEKQKKKIKESDLFVGSFYKNDLIMYEDELFRVIGVNSDINNLVELNMVDITYKDFCEVNNVTGEKHIKKTIGKRVVLIEKYTTDILGNLYKTPLPKKPQLIFKRGEL

SEQ ID NO: 4562 - protein, 1375 aa, Streptococcus canis
MEKKYSIGLDIGTNSVGWAVITDDYKVPSKKFKVLGNTNRKSIKKNLMGALLFDSGETAEATRLKRTARRRYTRRKNRIRYLQEIFANEMAKLDDSFFQRLEESFLVEEDKKNERHPIFGNLADEVAYHRNYPTIYHLRKKLADSPEKADLRLIYLALAHIIKFRGHFLIEGKLNAENSDVAKLFYQLIQTYNQLFEESPLDEIEVDAKGILSARLSKSKRLEKLIAVFPNEKKNGLFGNIIALALGLTPNFKSNFDLTEDAKLQLSKDTYDDDLDELLGQIGDQYADLFSAAKNLSDAILLSDILRSNSEVTKAPLSASMVKRYDEHHQDLALLKTLVRQQFPEKYAEIFKDDTKNGYAGYVGADKKLRKRSGKLATEEEFYKFIKPILEKMDGAEELLAKLNRDDLLRKQRTFDNGSIPHQIHLKELHAILRRQEEFYPFLKENREKIEKILTFRIPYYVGPLARGNSRFAWLTRKSEEAITPWNFEEVVDKGASAQSFIERMTNFDEQLPNKKVLPKHSLLYEYFTVYNELTKVKYVTERMRKPEFLSGEQKKAIVDLLFKTNRKVTVKQLKEDYFKKIECFDSVEIIGVEDRFNASLGTYHDLLKIIKDKDFLDNEENEDILEDIVLTLTLFEDREMIEERLKTYAHLFDDKVMKQLKRRHYTGWGRLSRKMINGIRDKQSGKTILDFLKSDGFSNRNFMQLIHDDSLTFKEEIEKAQVSGQGDSLHEQIADLAGSPAIKKGILQTVKIVDELVKVMGHKPENIVIEMARENQTTTKGLQQSRERKKRIEEGIKELESQILKENPVENTQLQNEKLYLYYLQNGRDMYVDQELDINRLSDYDVDHIVPQSFIKDDSIDNKVLTRSVENRGKSDNVPSEEVVKKMKNYWRQLLNAKLITQRKFDNLTKAERGGLSEADKAGFIKRQLVETRQITKHVARILDSRMNTKRDKNDKPIREVKVITLKSKLVSDFRKDFQLYKVRDINNYHHAHDAYLNAVVGTALIKKYPKLESEFVYGDYKVYDVRKMIAKSEQEIGKATAKRFFYSNIMNFFKTEVKLANGEIRKRPLIETNGETGEVVWNKEKDFATVRKVLAMPQVNIVKKTEVQTGGFSKESILSKRESAKLIPRKKGWDTRKYGGFGSPTVAYSILVVAKVEKGKAKKLKSVKVLVGITIMEKGSYEKDPIGFLEAKGYKDIKKELIFKLPKYSLFELENGRRRMLASAKELQKANELVLPQHLVRLLYYTQNISATTGSNNLGYIEQHREEFKEIFEKIIDFSEKYILKNKVNSNLKSSFDEQFAVSDSILLSNSFVSLLKYTSFGASGGFTFLDLDVKQGRLRYQTVTEVLDATLIYQSITGLYETRTDLSQLGGD

SEQ ID NO: 4563 - protein, 1368 aa, Streptococcus pyogenes [sequence omitted]

SEQ ID NO: 4564 - protein, 1368 aa, Streptococcus pyogenes
MDKKYSIGLDIGTNSVGWAVITDEYKVPSKKFKVLGNTDRHSIKKNLIGALLFDSGETAEATRLKRTARRRYTRRKNRICYLQEIFSNEMAKVDDSFFHRLEESFLVEEDKKHERHPIFGNIVDEVAYHEKYPTIYHLRKKLVDSTDKADLRLIYLALAHMIKFRGHFLIEGDLNPDNSDVDKLFIQLVQTYNQLFEENPINASGVDAKAILSARLSKSRRLENLIAQLPGEKKNGLFGNLIALSLGLTPNFKSNFDLAEDAKLQLSKDTYDDDLDNLLAQIGDQYADLFLAAKNLSDAILLSDILRVNTEITKAPLSASMIKRYDEHHQDLTLLKALVRQQLPEKYKEIFFDQSKNGYAGYIDGGASQEEFYKFIKPILEKMDGTEELLVKLNREDLLRKQRTFDNGSIPHQIHLGELHAILRRQEDFYPFLKDNREKIEKILTFRIPYYVGPLARGNSRFAWMTRKSEETITPWNFEEVVDKGASAQSFIERMTNFDKNLPNEKVLPKHSLLYEYFTVYNELTKVKYVTEGMRKPAFLSGEQKKAIVDLLFKTNRKVTVKQLKEDYFKKIECFDSVEISGVEDRFNASLGTYHDLLKIIKDKDFLDNEENEDILEDIVLTLTLFEDREMIEERLKTYAHLFDDKVMKQLKRRRYTGWGRLSRKLINGIRDKQSGKTILDFLKSDGFANRNFMQLIHDDSLTFKEDIQKAQVSGQGDSLHEHIANLAGSPAIKKGILQTVKVVDELVKVMGRHKPENIVIEMARENQTTQKGQKNSRERMKRIEEGIKELGSQILKEHPVENTQLQNEKLYLYYLQNGRDMYVDQELDINRLSDYDVDHIVPQSFLKDDSIDNKVLTRSDKNRGKSDNVPSEEVVKKMKNYWRQLLNAKLITQRKFDNLTKAERGGLSELDKAGFIKRQLVETRQITKHVAQILDSRMNTKYDENDKLIREVKVITLKSKLVSDFRKDFQFYKVREINNYHHAHDAYLNAVVGTALIKKYPKLESEFVYGDYKVYDVRKMIAKSEQEIGKATAKYFFYSNIMNFFKTEITLANGEIRKRPLIETNGETGEIVWDKGRDFATVRKVLSMPQVNIVKKTEVQTGGFSKESIRPKRNSDKLIARKKDWDPKKYGGFVSPTVAYSVLVVAKVEKGKSKKLKSVKELLGITIMERSSFEKNPIDFLEAKGYKEVKKDLIIKLPKYSLFELENGRKRMLASARFLQKGNELALPSKYVNFLYLASHYEKLKGSPEDNEQKQLFVEQHKHYLDEIIEQISEFSKRVILADANLDKVLSAYNKHRDKPIREQAENIIHLFTLTNLGAPRAFKYFDTTIDRKVYRSTKEVLDATLIHQSITGLYETRIDLSQLGGD

SEQ ID NO: 4565 - protein, 1368 aa, Streptococcus pyogenes
MDKKYSIGLDIGTNSVGWAVITDEYKVPSKKFKVLGNTDRHSIKKNLIGALLFDSGETAERTRLKRTARRRYTRRKNRICYLQEIFSNEMAKVDDSFFHRLEESFLVEEDKKHERHPIFGNIVDEVAYHEKYPTIYHLRKKLVDSTDKADLRLIYLALAHMIKFRGHFLIEGDLNPDNSDVDKLFIQLVQTYNQLFEENPINASGVDAKAILSARLSKSRRLENLIAQLPGEKKNGLFGNLIALSLGLTPNFKSNFDLAEDAKLQLSKDTYDDDLDNLLAQIGDQYADLFLAAKNLSDAILLSDILRVNTEITKAPLSASMIKRYDEHHQDLTLLKALVRQQLPEKYKEIFFDQSKNGYAGYIDGGASQEEFYKFIKPILEKMDGTEELLVKLNREDLLRKQRTFDNGSIPHQIHLGELHAILRRQEDFYPFLKDNREKIEKILTFRIPYYVGPLARGNSRFAWMTRKSEETITPWNFEEVVDKGASAQSFIERMTNFDKNLPNEKVLPKHSLLYEYFTVYNELTKVKYVTEGMRKPAFLSGEQKKAIVDLLFKTNRKVTVKQLKEDYFKKIECFDSVEISGVEDRFNASLGTYHDLLKIIKDKDFLDNEENEDILEDIVLTLTLFEDREMIEERLKTYAHLFDDKVMKQLKRRRYTGWGRLSRKLINGIRDKQSGKTILDFLKSDGFANRNFMQLIHDDSLTFKEDIQKAQVSGQGDSLHEHIANLAGSPAIKKGILQTVKVVDELVKVMGRHKPENIVIEMARENQTTQKGQKNSRERMKRIEEGIKELGSQILKEHPVENTQLQNEKLYLYYLQNGRDMYVDQELDINRLSDYDVDHIVPQSFLKDDSIDNKVLTRSDKNRGKSDNVPSEEVVKKMKNYWRQLLNAKLITQRKFDNLTKAERGGLSELDKAGFIKRQLVETRQITKHVAQILDSRMNTKYDENDKLIREVKVITLKSKLVSDFRKDFQFYKVREINNYHHAHDAYLNAVVGTALIKKYPKLESEFVYGDYKVYDVRKMIAKSEQEIGKATAKYFFYSNIMNFFKTEITLANGEIRKRPLIETNGETGEIVWDKGRDFATVRKVLSMPQVNIVKKTEVQTGGFSKESIRPKRNSDKLIARKKDWDPKKYGGFLWPTVAYSVLVVAKVEKGKSKKLKSVKELLGITIMERSSFEKNPIDFLEAKGYKEVKKDLIIKLPKYSLFELENGRKRMLASAKQLQKGNELALPSKYVNFLYLASHYEKLKGSPEDNEQKQLFVEQHKHYLDEIIEQISEFSKRVILADANLDKVLSAYNKHRDKPIREQAENIIHLFTLTRLGAPRAFKYFDTTIDPKQYRSTKEVLDATLIHQSITGLYETRIDLSQLGGD

SEQ ID NO: 4566 - protein, 1121 aa, Streptococcus thermophilus
MSDLVLGLDIGIGSVGVGILNKVTGEIIHKNSRIFPAAQAENNLVRRTNRQGRRLARRKKHRRVRLNRLFEESGLITDFTKISINLNPYQLRVKGLTDELSNEELFIALKNMVKHRGISYLDDASDDGNSSVGDYAQIVKENSKQLETKTPGQIQLERYQTYGQLRGDFTVEKDGKKHRLINVFPTSAYRSEALRILQTQQEFNPQITDEFINRYLEILTGKRKYYHGPGNEKSRTDYGRYRTSGETLDNIFGILIGKCTFYPDEFRAAKASYTAQEFNLLNDLNNLTVPTETKKLSKEQKNQIINYVKNEKAMGPAKLFKYIAKLLSCDVADIKGYRIDKSGKAEIHTFEAYRKMKTLETLDIEQMDRETLDKLAYVLTLNTEREGIQEALEHEFADGSFSQKQVDELVQFRKANSSIFGKGWHNFSVKLMMELIPELYETSEEQMTILTRLGKQKTTSSSNKTKYIDEKLLTEEIYNPVVAKSVRQAIKIVNAAIKEYGDFDNIVIEMARETNEDDEKKAIQKIQKANKDEKDAAMLKAANQYNGKAELPHSVFHGHKQLATKIRLWHQQGERCLYTGKTISIHDLINNSNQFEVDHILPLSITFDDSLANKVLVYATANQEKGQRTPYQALDSMDDAWSFRELKAFVRESKTLSNKKKEYLLTEEDISKFDVRKKFIERNLVDTRYASRVVLNALQEHFRAHKIDTKVSVVRGQFTSQLRRHWGIEKTRDTYHHHAVDALIIAASSQLNLWKKQKNTLVSYSEDQLLDIETGELISDDEYKESVFKAPYQHFVDTLKSKEFEDSILFSYQVDSKFNRKISDATIYATRQAKVGKDKADETYVLGKIKDIYTQDGYDAFMKIYKKDKSKFLMYRHDPQTFEKVIEPILENYPNKQINEKGKEVPCNPFLKYKEEHGYIRKYSKKGNGPEIKSLKYYDSKLGNHIDITPKDSNNKVVLQSVSPWRADVYFNKTTGKYEILGLKYADLQFEKGTGTYKISQEKYNDIKKKEGVDSDSEFKFTLYKNDLLLVKDTETKEQQLFRFLSRTMPKQKHYVELKPYDKQKFEGGEALIKVLGNVANSGQCKKGLGKSNISIYKVRTDVLGNQHIIKNEGDKPKLDF

SEQ ID NO: 4567 - protein, 1092 aa, Brevibacillus laterosporus
MAYTMGIDVGIASCGWAIVDLERQRIIDIGVRTFEKAENPKNGEALAVPRREARSSRRRLRRKKHRIERLKHMFVRNGLAVDIQHLEQTLRSQNEIDVWQLRVDGLDRMLTQKEWLRVLIHLAQRRGFQSNRKTDGSSEDGQVLVNVTENDRLMEEKDYRTVAEMMVKDEKFSDHKRNKNGNYHGVVSRSSLLVEIHTLFETQRQHHNSLASKDFELEYVNIWSAQRPVATKDQIEKMIGTCTFLPKEKRAPKASWHFQYFMLLQTINHIRITNVQGTRSLNKEEIEQVVNMALTKSKVSYHDTRKILDLSEEYQFVGLDYGKEDEKKKVESKETIIKLDDYHKLNKIFNEVELAKGETWEADDYDTVAYALTFFKDDEDIRDYLQNKYKDSKNRLVKNLANKEYTNELIGKVSTLSFRKVGHLSLKALRKIIPFLEQGMTYDKACQAAGFDFQGISKKKRSVVLPVIDQISNPVVNRALTQTRKVINALIKKYGSPETIHIETARELSKTFDERKNITKDYKENRDKNEHAKKHLSELGIINPTGLDIVKYKLWCEQQGRCMYSNQPISFERLKESGYTEVDHIIPYSRSMNDSYNNRVLVMTRENREKGNQTPFEYMGNDTQRWYEFEQRVTTNPQIKKEKRQNLLLKGFTNRRELEMLERNLNDTRYITKYLSHFISTNLEFSPSDKKKKVVNTSGRITSHLRSRWGLEKNRGQNDLHHAMDAIVIAVTSDSFIQQVTNYYKRKERRELNGDDKFPLPWKFFREEVIARLSPNPKEQIEALPNHFYSEDELADLQPIFVSRMPKRSITGEAHQAQFRRVVGKTKEGKNITAKKTALVDISYDKNGDFNMYGRETDPATYEAIKERYLEFGGNVKKAFSTDLHKPKKDGTKGPLIKSVRIMENKTLVHPVNKGKGVVYNSSIVRTDVFQRKEKYYLLPVYVTDVTKGKLPNKVIVAKKGYHDWIEVDDSFTFLFSLYPNDLIFIRQNPKKKISLKKRIESHSISDSKEVQEIHAYYKGVDSSTAAIEFIIHDGSYYAKGVGVQNLDCFEKYQVDILGNYFKVKGEKRLELETSDSNHKGKDVNSIKSTSR

SEQ ID NO: 4568 - protein, 1053 aa, Staphylococcus aureus
MKRNYILGLDIGITSVGYGIIDYETRDVIDAGVRLFKEANVENNEGRRSKRGARRLKRRRRHRIQRVKKLLFDYNLLTDHSELSGINPYEARVKGLSQKLSEEEFSAALLHLAKRRGVHNVNEVEEDTGNELSTKEQISRNSKALEEKYVAELQLERLKKDGEVRGSINRFKTSDYVKEAKQLLKVQKAYHQLDQSFIDTYIDLLETRRTYYEGPGEGSPFGWKDIKEWYEMLMGHCTYFPEELRSVKYAYNADLYNALNDLNNLVITRDENEKLEYYEKFQIIENVFKQKKKPTLKQIAKEILVNEEDIKGYRVTSTGKPEFTNLKVYHDIKDITARKEIIENAELLDQIAKILTIYQSSEDIQEELTNLNSELTQEEIEQISNLKGYTGTHNLSLKAINLILDELWHTNDNQIAIFNRLKLVPKKVDLSQQKEIPTTLVDDFILSPVVKRSFIQSIKVINAIIKKYGLPNDIIIELAREKNSKDAQKMINEMQKRNRQTNERIEEIIRTTGKENAKYLIEKIKLHDMQEGKCLYSLEAIPLEDLLNNPFNYEVDHIIPRSVSFDNSFNNKVLVKQEENSKKGNRTPFQYLSSSDSKISYETFKKHILNLAKGKGRISKTKKEYLLEERDINRFSVQKDFINRNLVDTRYATRGLMNLLRSYFRVNNLDVKVKSINGGFTSFLRRKWKFKKERNKGYKHHAEDALIIANADFIFKEWKKLDKAKKVMENQMFEEKQAESMPEIETEQEYKEIFITPHQIKHIKDFKDYKYSHRVDKKPNRKLINDTLYSTRKDDKGNTLIVNNLNGLYDKDNDKLKKLINKSPEKLLMYHHDPQTYQKLKLIMEQYGDEKNPLYKYYEETGNYLTKYSKKDNGPVIKKIKYYGNKLNAHLDITDDYPNSRNKVVKLSLKPYRFDVYLDNGVYKFVTVKNLDVIKKENYYEVNSKCYEEAKKLKKISNQAEFIASFYKNDLIKINGELYRVIGVNSDKNNLIEVNMIDITYREYLENMNDKRPPHIIKTIASKTQSIKKYSTDILGNLYEVKSKKHPQIIKKG

SEQ ID NO: 4569 - protein, 1053 aa, Staphylococcus aureus
MKRNYILGLDIGITSVGYGIIDYETRDVIDAGVRLFKEANVENNEGRRSKRGARRLKRRRRHRIQRVKKLLFDYNLLTDHSELSGINPYEARVKGLSQKLSEEEFSAALLHLAKRRGVHNVNEVEEDTGNELSTKEQISRNSKALEEKYVAELQLERLKKDGEVRGSINRFKTSDYVKEAKQLLKVQKAYHQLDQSFIDTYIDLLETRRTYYEGPGEGSPFGWKDIKEWYEMLMGHCTYFPEELRSVKYAYNADLYNALNDLNNLVITRDENEKLEYYEKFQIIENVFKQKKKPTLKQIAKEILVNEEDIKGYRVTSTGKPEFTNLKVYHDIKDITARKEIIENAELLDQIAKILTIYQSSEDIQEELTNLNSELTQEEIEQISNLKGYTGTHNLSLKAINLILDELWHTNDNQIAIFNRLKLVPKKVDLSQQKEIPTTLVDDFILSPVVKRSFIQSIKVINAIIKKYGLPNDIIIELAREKNSKDAQKMINEMQKRNRQTNERIEEIIRTTGKENAKYLIEKIKLHDMQEGKCLYSLEAIPLEDLLNNPFNYEVDHIIPRSVSFDNSFNNKVLVKQEENSKKGNRTPFQYLSSSDSKISYETFKKHILNLAKGKGRISKTKKEYLLEERDINRFSVQKDFINRNLVDTRYATRGLMNLLRSYFRVNNLDVKVKSINGGFTSFLRRKWKFKKERNKGYKHHAEDALIIANADFIFKEWKKLDKAKKVMENQMFEEKQAESMPEIETEQEYKEIFITPHQIKHIKDFKDYKYSHRVDKKPNRKLINDTLYSTRKDDKGNTLIVNNLNGLYDKDNDKLKKLINKSPEKLLMYHHDPQTYQKLKLIMEQYGDEKNPLYKYYEETGNYLTKYSKKDNGPVIKKIKYYGNKLNAHLDITDDYPNSRNKVVKLSLKPYRFDVYLDNGVYKFVTVKNLDVIKKENYYEVNSKCYEEAKKLKKISNQAEFIASFYKNDLIKINGELYRVIGVNNSTRNIVELNMIDITYREYLENMNDKRPPHIIKTIASKTQSIKKYSTDILGNLYEVKSKKHPQIIKKG

SEQ ID NO: 4570 - protein, 1053 aa, Staphylococcus aureus
MKRNYILGLDIGITSVGYGIIDYETRDVIDAGVRLFKEANVENNEGRRSKRGARRLKRRRRHRIQRVKKLLFDYNLLTDHSELSGINPYEARVKGLSQKLSEEEFSAALLHLAKRRGVHNVNEVEEDTGNELSTKEQISRNSKALEEKYVAELQLERLKKDGEVRGSINRFKTSDYVKEAKQLLKVQKAYHQLDQSFIDTYIDLLETRRTYYEGPGEGSPFGWKDIKEWYEMLMGHCTYFPEELRSVKYAYNADLYNALNDLNNLVITRDENEKLEYYEKFQIIENVFKQKKKPTLKQIAKEILVNEEDIKGYRVTSTGKPEFTNLKVYHDIKDITARKEIIENAELLDQIAKILTIYQSSEDIQEELTNLNSELTQEEIEQISNLKGYTGTHNLSLKAINLILDELWHTNDNQIAIFNRLKLVPKKVDLSQQKEIPTTLVDDFILSPVVKRSFIQSIKVINAIIKKYGLPNDIIIELAREKNSKDAQKMINEMQKRNRQTNERIEEIIRTTGKENAKYLIEKIKLHDMQEGKCLYSLEAIPLEDLLNNPFNYEVDHIIPRSVSFDNSFNNKVLVKQEENSKKGNRTPFQYLSSSDSKISYETFKKHILNLAKGKGRISKTKKEYLLEERDINRFSVQKDFINRNLVDTRYATRGLMNLLRSYFRVNNLDVKVKSINGGFTSFLRRKWKFKKERNKGYKHHAEDALIIANADFIFKEWKKLDKAKKVMENQMFEEKQAESMPEIETEQEYKEIFITPHQIKHIKDFKDYKYSHRVDKKPNRKLINDTLYSTRKDDKGNTLIVNNLNGLYDKDNDKLKKLINKSPEKLLMYHHDPQTYQKLKLIMEQYGDEKNPLYKYYEETGNYLTKYSKKDNGPVIKKIKYYGNKLNAHLDITDDYPNSRNKVVKLSLKPYRFDVYLDNGVYKFVTVKNLDVIKKENYYEVNSKCYEEAKKLKKISNQAEFIASFYKNDLIKINGELYRVIGVNSDDRNIIELNMIDITYREYLENMNDKRPPHIIKTIASKTQSIKKYSTDILGNLYEVKSKKHPQIIKKG

SEQ ID NO: 4571 - protein, 1053 aa, Staphylococcus aureus
MKRNYILGLDIGITSVGYGIIDYETRDVIDAGVRLFKEANVENNEGRRSKRGARRLKRRRRHRIQRVKKLLFDYNLLTDHSELSGINPYEARVKGLSQKLSEEEFSAALLHLAKRRGVHNVNEVEEDTGNELSTKEQISRNSKALEEKYVAELQLERLKKDGEVRGSINRFKTSDYVKEAKQLLKVQKAYHQLDQSFIDTYIDLLETRRTYYEGPGEGSPFGWKDIKEWYEMLMGHCTYFPEELRSVKYAYNADLYNALNDLNNLVITRDENEKLEYYEKFQIIENVFKQKKKPTLKQIAKEILVNEEDIKGYRVTSTGKPEFTNLKVYHDIKDITARKEIIENAELLDQIAKILTIYQSSEDIQEELTNLNSELTQEEIEQISNLKGYTGTHNLSLKAINLILDELWHTNDNQIAIFNRLKLVPKKVDLSQQKEIPTTLVDDFILSPVVKRSFIQSIKVINAIIKKYGLPNDIIIELAREKNSKDAQKMINEMQKRNRQTNERIEEIIRTTGKENAKYLIEKIKLHDMQEGKCLYSLEAIPLEDLLNNPFNYEVDHIIPRSVSFDNSFNNKVLVKQEENSKKGNRTPFQYLSSSDSKISYETFKKHILNLAKGKGRISKTKKEYLLEERDINRFSVQKDFINRNLVDTRYATRGLMNLLRSYFRVNNLDVKVKSINGGFTSFLRRKWKFKKERNKGYKHHAEDALIIANADFIFKEWKKLDKAKKVMENQMFEEKQAESMPEIETEQEYKEIFITPHQIKHIKDFKDYKYSHRVDKKPNRKLINDTLYSTRKDDKGNTLIVNNLNGLYDKDNDKLKKLINKSPEKLLMYHHDPQTYQKLKLIMEQYGDEKNPLYKYYEETGNYLTKYSKKDNGPVIKKIKYYGNKLNAHLDITDDYPNSRNKVVKLSLKPYRFDVYLDNGVYKFVTVKNLDVIKKENYYEVNSKCYEEAKKLKKISNQAEFIASFYKNDLIKINGELYRVIGVNNNRLNKIELNMIDITYREYLENMNDKRPPHIIKTIASKTQSIKKYSTDILGNLYEVKSKKHPQIIKKG

SEQ ID NO: 4572 - protein, 1084 aa, Corynebacterium diphtheriae
MKYHVGIDVGTFSVGLAAIEVDDAGMPIKTLSLVSHIHDSGLDPDEIKSAVTRLASSGIARRTRRLYRRKRRRLQQLDKFIQRQGWPVIELEDYSDPLYPWKVRAELAASYIADEKERGEKLSVALRHIARHRGWRNPYAKVSSLYLPDGPSDAFKAIREEIKRASGQPVPETATVGQMVTLCELGTLKLRGEGGVLSARLQQSDYAREIQEICRMQEIGQELYRKIIDVVFAAESPKGSASSRVGKDPLQPGKNRALKASDAFQRYRIAALIGNLRVRVDGEKRILSVEEKNLVFDHLVNLTPKKEPEWVTIAEILGIDRGQLIGTATMTDDGERAGARPPTHDTNRSIVNSRIAPLVDWWKTASALEQHAMVKALSNAEVDDFDSPEGAKVQAFFADLDDDVHAKLDSLHLPVGRAAYSEDTLVRLTRRMLSDGVDLYTARLQEFGIEPSWTPPTPRIGEPVGNPAVDRVLKTVSRWLESATKTWGAPERVIIEHVREGFVTEKRAREMDGDMRRRAARNAKLFQEMQEKLNVQGKPSRADLWRYQSVQRQNCQCAYCGSPITFSNSEMDHIVPRAGQGSTNTRENLVAVCHRCNQSKGNTPFAIWAKNTSIEGVSVKEAVERTRHWVTDTGMRSTDFKKFTKAVVERFQRATMDEEIDARSMESVAWMANELRSRVAQHFASHGTTVRVYRGSLTAEARRASGISGKLKFFDGVGKSRLDRRHHAIDAAVIAFTSDYVAETLAVRSNLKQSQAHRQEAPQWREFTGKDAEHRAAWRVWCQKMEKLSALLTEDLRDDRVVVMSNVRLRLGNGSAHKETIGKLSKVKLSSQLSVSDIDKASSEALWCALTREPGFDPKEGLPANPERHIRVNGTHVYAGDNIGLFPVSAGSIALRGGYAELGSSFHHARVYKITSGKKPAFAMLRVYTIDLLPYRNQDLFSVELKPQTMSMRQAEKKLRDALATGNAEYLGWLVVDDELVVDTSKIATDQVKAVEAELGTIRRWRVDGFFSPSKLRLRPLQMSKEGIKKESAPELSKIIDRPGWLPAVNKLFSDGNVTVVRRDSLGRVRLESTAHLPVTWKVQ

SEQ ID NO: 4573 - protein, 984 aa, Campylobacter jejuni
MARILAFDIGISSIGWAFSENDELKDCGVRIFTKVENPKTGESLALPRRLARSARKRLARRKARLNHLKHLIANEFKLNYEDYQSFDESLAKAYKGSLISPYELRFRALNELLSKQDFARVILHIAKRRGYDDIKNSDDKEKGAILKAIKQNEEKLANYQSVGEYLYKEYFQKFKENSKEFTNVRNKKESYERCIAQSFLKDELKLIFKKQREFGFSFSKKFEEEVLSVAFYKRALKDFSHLVGNCSFFTDEKRAPKNSPLAFMFVALTRIINLLNNLKNTEGILYTKDDLNALLNEVLKNGTLTYKQTKKLLGLSDDYEFKGEKGTYFIEFKKYKEFIKALGEHNLSQDDLNEIAKDITLIKDEIKLKKALAKYDLNQNQIDSLSKLEFKDHLNISFKALKLVTPLMLEGKKYDEACNELNLKVAINEDKKDFLPAFNETYYKDEVTNPVVLRAIKEYRKVLNALLKKYGKVHKINIELAREVGKNHSQRAKIEKEQNENYKAKKDAELECEKLGLKINSKNILKLRLFKEQKEFCAYSGEKIKISDLQDEKMLEIDHIYPYSRSFDDSYMNKVLVFTKQNQEKLNQTPFEAFGNDSAKWQKIEVLAKNLPTKKQKRILDKNYKDKEQKNFKDRNLNDTRYIARLVLNYTKDYLDFLPLSDDENTKLNDTQKGSKVHVEAKSGMLTSALRHTWGFSAKDRNNHLHHAIDAVIIAYANNSIVKAFSDFKKEQESNSAELYAKKISELDYKNKRKFFEPFSGFRQKVLDKIDEIFVSKPERKKPSGALHEETFRKEEEFYQSYGGKEGVLKALELGKIRKVNGKIVKNGDMFRVDIFKHKKTNKFYAVPIYTMDFALKVLPNKAVARSKKGEIKDWILMDENYEFCFSLYKDSLILIQTKDMQEPEFVYYNAFTSSTVSLIVSKHDNKFETLSKNQKILFKNANEKEVIAKSIGIQNLKVFEKYIVSALGEVTKAEFRQREDFKK

SEQ ID NO: 4574 - protein, 1087 aa, Geobacillus stearothermophilus
MRYKIGLDIGITSVGWAVMNLDIPRIEDLGVRIFDRAENPQTGESLALPRRLARSARRRLRRRKHRLERIRRLVIREGILTKEELDKLFEEKHEIDVWQLRVEALDRKLNNDELARVLLHLAKRRGFKSNRKSERSNKENSTMLKHIEENRAILSSYRTVGEMIVKDPKFALHKRNKGENYTNTIARDDLEREIRLIFSKQREFGNMSCTEEFENEYITIWASQRPVASKDDIEKKVGFCTFEPKEKRAPKATYTFQSFIAWEHINKLRLISPSGARGLTDEERRLLYEQAFQKNKITYHDIRTLLHLPDDTYFKGIVYDRGESRKQNENIRFLELDAYHQIRKAVDKVYGKGKSSSFLPIDFDTFGYALTLFKDDADIHSYLRNEYEQNGKRMPNLANKVYDNELIEELLNLSFTKFGHLSLKALRSILPYMEQGEVYSSACERAGYTFTGPKKKQKTMLLPNIPPIANPVVMRALTQARKVVNAIIKKYGSPVSIHIELARDLSQTFDERRKTKKEQDENRKKNETAIRQLMEYGLTLNPTGHDIVKFKLWSEQNGRCAYSLQPIEIERLLEPGYVEVDHVIPYSRSLDDSYTNKVLVLTRENREKGNRIPAEYLGVGTERWQQFETFVLTNKQFSKKKRDRLLRLHYDENEETEFKNRNLNDTRYISRFFANFIREHLKFAESDDKQKVYTVNGRVTAHLRSRWEFNKNREESDLHHAVDAVIVACTTPSDIAKVTAFYQRREQNKELAKKTEPHFPQPWPHFADELRARLSKHPKESIKALNLGNYDDQKLESLQPVFVSRMPKRSVTGAAHQETLRRYVGIDERSGKIQTVVKTKLSEIKLDASGHFPMYGKESDPRTYEAIRQRLLEHNNDPKKAFQEPLYKPKKNGEPGPVIRTVKIIDTKNQVIPLNDGKTVAYNSNIVRVDVFEKDGKYYCVPVYTMDIMKGILPNKAIEPNKPYSEWKEMTEDYTFRFSLYPNDLIRIELPREKTVKTAAGEEINVKDVFVYYKTIDSANGGLELISHDHRFSLRGVGSRTLKRFEKYQVDVLGNIYKVRGEKRVGLASSAHSKPGKTIRPLQSTRD

SEQ ID NO: 4575 - protein, 1378 aa, Streptococcus sp.
MDKKYSIGLDIGTNSVGWAVITDEYKVPSKKFKVLGNTDRHSIKKNLIGALLFDSGETAEATRLKRTARRRYTRRKNRICYLQEIFSNEMAKVDDSFFHRLEESFLVEEDKKHERHPIFGNIVDEVAYHEKYPTIYHLRKKLVDSTDKADLRLIYLALAHMIKFRGHFLIEGDLNPDNSDVDKLFIQLVQTYNQLFEENPINASGVDAKAILSARLSKSRKLENLIAQLPGEKKNGLFGNLIALSLGLTPNFKSNFDLAEDAKLQLSKDTYDDDLDNLLAQIGDQYADLFLAAKNLSDAILLSDILRVNTEITKAPLSASMIKRYDEHHQDLTLLKALVRQQLPEKYKEIFFDQSKNGYAGYIDGGASQEEFYKFIKPILEKMDGTEELLVKLKREDLLRKQRTFDNGSIPHQIHLGELHAILRRQEDFYPFLKDNREKIEKILTFRIPYYVGPLARGNSRFAWMTRKSEETITPWNFEEVVDKGASAQSFIERMTNFDKNLPNEKVLPKHSLLYEYFTVYNELTKVKYVTEGMRKPAFLSGEQKKAIVDLLFKTNRKVTVKQLKEDYFKKIECFDSVEISGVEDRFNASLGTYHDLLKIIKDKDFLDNEENEDILEDIVLTLTLFEDREMIEERLKTYAHLFDDKVMKQLKRRRYTGWGRLSRKLINGIRDKQSGKTILDFLKSDGFANRNFMQLIHDDSLTFKEDIQKAQVSGQGDSLHEHIANLAGSPAIKKGILQTVKVVDELVKVMGRHKPENIVIEMARENQTTQKGQKNSRERMKRIEEGIKELGSQILKEHPVENTQLQNEKLYLYYLQNGRDMYVDQELDINRLSDYDVDHIVPQSFLKDDSIDNKVLTRSDKNRGKSDNVPSEEVVKKMKNYWRQLLNAKLITQRKFDNLTKAERGGLSELDKAGFIKRQLVETRQITKHVAQILDSRMNTKYDENDKLIREVKVITLKSKLVSDFRKDFQFYKVREINNYHHAHDAYLNAVVGTALIKKYPKLESEFVYGDYKVYDVRKMIAKSEQEIGKATAKYFFYSNIMNFFKTEITLANGEIRKRPLIETNGETGEIVWDKGRDFATVRKVLSMPQVNIVKKTEIQTVGQNGGLFDDNPKSPLEVTPSKLVPLKKELNPKKYGGYQKPTTAYPVLLITDTKQLIPISVMNKKQFEQNPVKFLRDRGYQQVGKNDFIKLPKYTLVDIGDGIKRLWASSKEIHKGNQLVVSKKSQILLYHAHHLDSDLSNDYLQNHNQQFDVLFNEIISFSKKCKLGKEHIQKIENVYSNKKNSASIEELAESFIKLLGFTQLGATSPFNFLGVKLNQKQYKGKKDYILPCTEGTLIRQSITGLYETRVDLSKIGEDSGGSGGSKRTADGSEFES

SEQ ID NO: 4576 - protein, 1082 aa, Neisseria meningitidis
MAAFKPNSINYILGLDIGIASVGWAMVEIDEEENPIRLIDLGVRVFERAEVPKTGDSLAMARRLARSVRRLTRRRAHRLLRTRRLLKREGVLQAANFDENGLIKSLPNTPWQLRAAALDRKLTPLEWSAVLLHLIKHRGYLSQRKNEGETADKELGALLKGVAGNAHALQTGDFRTPAELALNKFEKESGHIRNQRSDYSHTFSRKDLQAELILLFEKQKEFGNPHVSGGLKEGIETLLMTQRPALSGDAVQKMLGHCTFEPAEPKAAKNTYTAERFIWLTKLNNLRILEQGSERPLTDTERATLMDEPYRKSKLTYAQARKLLGLEDTAFFKGLRYGKDNAEASTLMEMKAYHAISRALEKEGLKDKKSPLNLSPELQDEIGTAFSLFKTDEDITGRLKDRIQPEILEALLKHISFDKFVQISLKALRRIVPLMEQGKRYDEACAEIYGDHYGKKNTEEKIYLPPIPADEIRNPVVLRALSQARKVINGVVRRYGSPARIHIETAREVGKSFKDRKEIEKRQEENRKDREKAAAKFREYFPNFVGEPKSKDILKLRLYEQQHGKCLYSGKEINLGRLNEKGYVEIDHALPFSRTWDDSFNNKVLVLGSENQNKGNQTPYEYFNGKDNSREWQEFKARVETSRFPRSKKQRILLQKFDEDGFKERNLNDTRYVNRFLCQFVADRMRLTGKGKKRVFASNGQITNLLRGFWGLRKVRAENDRHHALDAVVVACSTVAMQQKITRFVRYKEMNAFDGKTIDKETGEVLHQKTHFPQPWEFFAQEVMIRVFGKPDGKPEFEEADTLEKLRTLLAEKLSSRPEAVHEYVTPLFVSRAPNRKMSGQGHMETVKSAKRLDEGVSVLRVPLTQLKLKDLEKMVNREREPKLYEALKARLEAHKDDPAKAFAEPFYKYDKAGNRTQQVKAVRVEQVQKTGVWVRNHNGIADNATMVRVDVFEKGDKYYLVPIYSWQVAKGILPDRAVVQGKDEEDWQLIDDSFNFKFSLHPNDLVEVITKKARMFGYFASCHRGTGNINIRIHDLDHKIGKNGILEGIGVKTALSFQKYQIDELGKEIRPCRLKKRPPVR

SEQ ID NO: 4577 - protein, 1375 aa, Streptococcus canis
MEKKYSIGLDIGTNSVGWAVITDDYKVPSKKFKVLGNTNRKSIKKNLMGALLFDSGETAEATRLKRTARRRYTRRKNRIRYLQEIFANEMAKLDDSFFQRLEESFLVEEDKKNERHPIFGNLADEVAYHRNYPTIYHLRKKLADSPEKADLRLIYLALAHIIKFRGHFLIEGKLNAENSDVAKLFYQLIQTYNQLFEESPLDEIEVDAKGILSARLSKSKRLEKLIAVFPNEKKNGLFGNIIALALGLTPNFKSNFDLTEDAKLQLSKDTYDDDLDELLGQIGDQYADLFSAAKNLSDAILLSDILRSNSEVTKAPLSASMVKRYDEHHQDLALLKTLVRQQFPEKYAEIFKDDTKNGYAGYVGIGIKHRKRTTKLATQEEFYKFIKPILEKMDGAEELLAKLNRDDLLRKQRTFDNGSIPHQIHLKELHAILRRQEEFYPFLKENREKIEKILTFRIPYYVGPLARGNSRFAWLTRKSEEAITPWNFEEVVDKGASAQSFIERMTNFDEQLPNKKVLPKHSLLYEYFTVYNELTKVKYVTERMRKPEFLSGEQKKAIVDLLFKTNRKVTVKQLKEDYFKKIECFDSVEIIGVEDRFNASLGTYHDLLKIIKDKDFLDNEENEDILEDIVLTLTLFEDREMIEERLKTYAHLFDDKVMKQLKRRHYTGWGRLSRKMINGIRDKQSGKTILDFLKSDGFSNRNFMQLIHDDSLTFKEEIEKAQVSGQGDSLHEQIADLAGSPAIKKGILQTVKIVDELVKVMGHKPENIVIEMARENQTTTKGLQQSRERKKRIEEGIKELESQILKENPVENTQLQNEKLYLYYLQNGRDMYVDQELDINRLSDYDVDHIVPQSFIKDDSIDNKVLTRSVENRGKSDNVPSEEVVKKMKNYWRQLLNAKLITQRKFDNLTKAERGGLSEADKAGFIKRQLVETRQITKHVARILDSRMNTKRDKNDKPIREVKVITLKSKLVSDFRKDFQLYKVRDINNYHHAHDAYLNAVVGTALIKKYPKLESEFVYGDYKVYDVRKMIAKSEQEIGKATAKRFFYSNIMNFFKTEVKLANGEIRKRPLIETNGETGEVVWNKEKDFATVRKVLAMPQVNIVKKTEVQTGGFSKESILSKRESAKLIPRKKGWDTRKYGGFGSPTVAYSILVVAKVEKGKAKKLKSVKVLVGITIMEKGSYEKDPIGFLEAKGYKDIKKELIFKLPKYSLFELENGRRRMLASATELQKANELVLPQHLVRLLYYTQNISATTGSNNLGYIEQHREEFKEIFEKIIDFSEKYILKNKVNSNLKSSFDEQFAVSDSILLSNSFVSLLKYTSFGASGGFTFLDLDVKQGRLRYQTVTEVLDATLIYQSITGLYETRTDLSQLGGD

SEQ ID NO: 4578 - protein, 1375 aa, Streptococcus canis
MEKKYSIGLDIGTNSVGWAVITDDYKVPSKKFKVLGNTNRKSIKKNLMGALLFDSGETAEATRLKRTARRRYTRRKNRIRYLQEIFANEMAKLDDSFFQRLEESFLVEEDKKNERHPIFGNLADEVAYHRNYPTIYHLRKKLADSPEKADLRLIYLALAHIIKFRGHFLIEGKLNAENSDVAKLFYQLIQTYNQLFEESPLDEIEVDAKGILSARLSKSKRLEKLIAVFPNEKKNGLFGNIIALALGLTPNFKSNFDLTEDAKLQLSKDTYDDDLDELLGQIGDQYADLFSAAKNLSDAILLSDILRSNSEVTKAPLSASMVKRYDEHHQDLALLKTLVRQQFPEKYAEIFKDDTKNGYAGYVGADKKLRKRSGKLATEEEFYKFIKPILEKMDGAEELLAKLNRDDLLRKQRTFDNGSIPHQIHLKELHAILRRQEEFYPFLKENREKIEKILTFRIPYYVGPLARGNSRFAWLTRKSEEAITPWNFEEVVDKGASAQSFIERMTNFDEQLPNKKVLPKHSLLYEYFTVYNELTKVKYVTERMRKPEFLSGEQKKAIVDLLFKTNRKVTVKQLKEDYFKKIECFDSVEIIGVEDRFNASLGTYHDLLKIIKDKDFLDNEENEDILEDIVLTLTLFEDREMIEERLKTYAHLFDDKVMKQLKRRHYTGWGRLSRKMINGIRDKQSGKTILDFLKSDGFSNANFMQLIHDDSLTFKEEIEKAQVSGQGDSLHEQIADLAGSPAIKKGILQTVKIVDELVKVMGHKPENIVIEMARENQTTTKGLQQSRERKKRIEEGIKELESQILKENPVENTQLQNEKLYLYYLQNGRDMYVDQELDINRLSDYDVDHIVPQSFIKDDSIDNKVLTRSVENRGKSDNVPSEEVVKKMKNYWRQLLNAKLITQRKFDNLTKAERGGLSEADKAGFIKRQLVETRQITKHVARILDSRMNTKRDKNDKPIREVKVITLKSKLVSDFRKDFQLYKVRDINNYHHAHDAYLNAVVGTALIKKYPKLESEFVYGDYKVYDVRKMIAKSEQEIGKATAKRFFYSNIMNFFKTEVKLANGEIRKRPLIETNGETGEVVWNKEKDFATVRKVLAMPQVNIVKKTEVQTGGFSKESILSKRESAKLIPRKKGWDTRKYGGFGSPTVAYSILVVAKVEKGKAKKLKSVKVLVGITIMEKGSYEKDPIGFLEAKGYKDIKKELIFKLPKYSLFELENGRRRMLASAKELQKANELVLPQHLVRLLYYTQNISATTGSNNLGYIEQHREEFKEIFEKIIDFSEKYILKNKVNSNLKSSFDEQFAVSDSILLSNSFVSLLKYTSFGASGGFTFLDLDVKQGRLRYQTVTEVLDATLIYQSITGLYETRTDLSQLGGD

SEQ ID NO: 4579 - protein, 1368 aa, Streptococcus pyogenes
MDKKYSIGLDIGTNSVGWAVITDEYKVPSKKFKVLGNTDRHSIKKNLIGALLFDSGETAEATRLKRTARRRYTRRKNRICYLQEIFSNEMAKVDDSFFHRLEESFLVEEDKKHERHPIFGNIVDEVAYHEKYPTIYHLRKKLVDSTDKADLRLIYLALAHMIKFRGHFLIEGDLNPDNSDVDKLFIQLVQTYNQLFEENPINASGVDAKAILSARLSKSRRLENLIAQLPGEKKNGLFGNLIALSLGLTPNFKSNFDLAEDAKLQLSKDTYDDDLDNLLAQIGDQYADLFLAAKNLSDAILLSDILRVNTEITKAPLSASMVKRYDEHHQDLTLLKALVRQQLPEKYKEIFFDQSKNGYAGYIDGGASQEEFYKFIKPILEKMDGTEELLVKLNREDLLRKQRTFDNGIIPHQIHLGELHAILRRQGDFYPFLKDNREKIEKILTFRIPYYVGPLARGNSRFAWMTRKSEETITPWNFEEVVDKGASAQSFIERMTNFDKNLPNEKVLPKHSLLYEYFTVYNELTKVKYVTEGMRKPAFLSGEQKKAIVDLLFKTNRKVTVKQLKEDYFKKIECFDSVEISGVEDRFNASLGTYHDLLKIIKDKDFLDNEENEDILEDIVLTLTLFEDREMIEERLKTYAHLFDDKVMKQLKRLRYTGWGRLSRKLINGIRDKQSGKTILDFLKSDGFANRNFMQLIHDDSLTFKEDIQKAQVSGQGDSLHEHIANLAGSPAIKKGILQTVKVVDELVKVMGGHKPENIVIEMARENQTTQKGQKNSRERMKRIEEGIKELGSQILKEHPVENTQLQNEKLYLYYLQNGRDMYVDQELDINRLSDYDVDHIVPQSFLKDDSIDNKVLTRSDKNRGKSDNVPSEEVVKKMKNYWRQLLNAKLITQRKFDNLTKAERGGLSELDKAGFIKRQLVETRQITKHVAQILDSRMNTKYDENDKLIREVKVITLKSKLVSDFRKDFQFYKVREINNYHHAHDAYLNAVVGTALIKKYPKLESEFVYGDYKVYDVRKMIAKSEQEIGKATAKYFFYSNIMNFFKTEITLANGEIRKRPLIETNGETGEIVWDKGRDFATVRKVLSMPQVNIVKKTEVQTGGFSKESILPKGNSDKLIARKKDWDPKKYGGFNSPTAAYSVLVVAKVEKGKSKKLKSVKELLGITIMERSSFEKNPIGFLEAKGYKEVKKDLIIKLPKYSLFELENGRKRMLASAGVLHKGNELALPSKYVNFLYLASHYEKLKGSPEDNEQKQLFVEQHKHYLDEIIEQISEFSKRVILADANLDKVLSAYNKHRDKPIREQAENIIHLFTLTNLGVPAAFKYFDTTIDKKRYTSTKEVLDATLIHQSITGLYETRIDLSQLGGD

SEQ ID NO: 4580 - protein, 1368 aa, Streptococcus pyogenes
MDKKYSIGLDIGTNSVGWAVITDEYKVPSKKFKVLGNTDRHSIKKNLIGALLFDSGETAEATRLKRTARRRYTRRKNRICYLQEIFSNEMAKVDDSFFHRLEESFLVEEDKKHERHPIFGNIVDEVAYHEKYPTIYHLRKKLVDSTDKADLRLIYLALAHMIKFRGHFLIEGDLNPDNSDVDKLFIQLVQTYNQLFEENPINASGVDAKAILSARLSKSRRLENLIAQLPGEKKNGLFGNLIALSLGLTPNFKSNFDLAEDAKLQLSKDTYDDDLDNLLAQIGDQYADLFLAAKNLSDAILLSDILRVNTEITKAPLSASMVKRYDEHHQDLTLLKALVRQQLPEKYKEIFFDQSKNGYAGYIDGGASQEEFYKFIKPILEKMDGTEELLVKLNREDLLRKQRTFDNGIIPHQIHLGELHAILRRQGDFYPFLKDNREKIEKILTFRIPYYVGPLARGNSRFAWMTRKSEETITPWNFEEVVDKGASAQSFIERMTNFDKNLPNEKVLPKHSLLYEYFTVYNELTKVKYVTEGMRKPAFLSGEQKKAIVDLLFKTNRKVTVKQLKEDYFKKIECFDSVEISGVEDRFNASLGTYHDLLKIIKDKDFLDNEENEDILEDIVLTLTLFEDREMIEERLKTYAHLFDDKVMKQLKRLRYTGWGRLSRKLINGIRDKQSGKTILDFLKSDGFANRNFMQLIHDDSLTFKEDIQKAQVSGQGDSLHEHIANLAGSPAIKKGILQTVKVVDELVKVMGGHKPENIVIEMARENQTTQKGQKNSRERMKRIEEGIKELGSQILKEHPVENTQLQNEKLYLYYLQNGRDMYVDQELDINRLSDYDVDHIVPQSFLKDDSIDNKVLTRSDKNRGKSDNVPSEEVVKKMKNYWRQLLNAKLITQRKFDNLTKAERGGLSELDKAGFIKRQLVETRQITKHVAQILDSRMNTKYDENDKLIREVKVITLKSKLVSDFRKDFQFYKVREINNYHHAHDAYLNAVVGTALIKKYPKLESEFVYGDYKVYDVRKMIAKSEQEIGKATAKYFFYSNIMNFFKTEITLANGEIRKRPLIETNGETGEIVWDKGRDFATVRKVLSMPQVNIVKKTEVQTGGFSKESILPKGNSDKLIARKKDWDPKKYGGFNSPTVAYSVLVVAKVEKGKSKKLKSVKELLGITIMERSSFEKNPIGFLEAKGYKEVKKDLIIKLPKYSLFELENGRKRMLASASVLHKGNELALPSKYVNFLYLASHYEKLKGSSEDNKQKQLFVEQHKHYLDEIIEQISEFSKRVILADANLDKVLSAYNKHRDKPIREQAENIIHLFTLTNLGASAAFKYFDTTIGRKLYTSTKEVLDATLIHQSITGLYETRIDLSQLGGD

SEQ ID NO: 4581 - protein, 1368 aa, Streptococcus pyogenes
MDKKYSIGLDIGTNSVGWAVITDEYKVPSKKFKVLGNTDRHSIKKNLIGALLFDSGETAEATRLKRTARRRYTRRKNRICYLQEIFSNEMAKVDDSFFHRLEESFLVEEDKKHERHPIFGNIVDEVAYHEKYPTIYHLRKKLVDSTDKADLRLIYLALAHMIKFRGHFLIEGDLNPDNSDVDKLFIQLVQTYNQLFEENPINASGVDAKAILSARLSKSRRLENLIAQLPGEKKNGLFGNLIALSLGLTPNFKSNFDLAEDAKLQLSKDTYDDDLDNLLAQIGDQYADLFLAAKNLSDAILLSDILRVNTEITKAPLSASMVKRYDEHHQDLTLLKALVRQQLPEKYKEIFFDQSKNGYAGYIDGGASQEEFYKFIKPILEKMDGTEELLVKLNREDLLRKQRTFDNGIIPHQIHLGELHAILRRQGDFYPFLKDNREKIEKILTFRIPYYVGPLARGNSRFAWMTRKSEETITPWNFEEVVDKGASAQSFIERMTNFDKNLPNEKVLPKHSLLYEYFTVYNELTKVKYVTEGMRKPAFLSGEQKKAIVDLLFKTNRKVTVKQLKEDYFKKIECFDSVEISGVEDRFNASLGTYHDLLKIIKDKDFLDNEENEDILEDIVLTLTLFEDREMIEERLKTYAHLFDDKVMKQLKRLRYTGWGRLSRKLINGIRDKQSGKTILDFLKSDGFANRNFMQLIHDDSLTFKEDIQKAQVSGQGDSLHEHIANLAGSPAIKKGILQTVKVVDELVKVMGGHKPENIVIEMARENQTTQKGQKNSRERMKRIEEGIKELGSQILKEHPVENTQLQNEKLYLYYLQNGRDMYVDQELDINRLSDYDVDHIVPQSFLKDDSIDNKVLTRSDKNRGKSDNVPSEEVVKKMKNYWRQLLNAKLITQRKFDNLTKAERGGLSELDKAGFIKRQLVETRQITKHVAQILDSRMNTKYDENDKLIREVKVITLKSKLVSDFRKDFQFYKVREINNYHHAHDAYLNAVVGTALIKKYPKLESEFVYGDYKVYDVRKMIAKSEQEIGKATAKYFFYSNIMNFFKTEITLANGEIRKRPLIETNGETGEIVWDKGRDFATVRKVLSMPQVNIVKKTEVQTGGFSKESILPKGNSDKLIARKKDWDPKKYGGFNSPTVAYSVLVVAKVEKGKSKKLKSVKELLGITIMERSSFEKNPIDFLEAKGYKEVKKDLIIKLPKYSLFELENGRKRMLASAGVLQKGNELALPSKYVNFLYLASHYEKLKGSPEDNEQKQLFVEQHKHYLDEIIEQISEFSKRVILADANLDKVLSAYNKHRDKPIREQAENIIHLFTLTNLGAPAAFKYFDTTINRKQYNTTKEVLDATLIRQSITGLYETRIDLSQLGGD

SEQ ID NO: 4582 - protein, 1368 aa, Streptococcus pyogenes
MDKKYSIGLDIGTNSVGWAVITDEYKVPSKKFKVLGNTDRHSIKKNLIGALLFDSGETAEATRLKRTARRRYTRRKNRICYLQEIFSNEMAKVDDSFFHRLEESFLVEEDKKHERHPIFGNIVDEVAYHEKYPTIYHLRKKLVDSTDKADLRLIYLALAHMIKFRGHFLIEGDLNPDNSDVDKLFIQLVQTYNQLFEENPINASGVDAKAILSARLSKSRRLENLIAQLPGEKKNGLFGNLIALSLGLTPNFKSNFDLAEDAKLQLSKDTYDDDLDNLLAQIGDQYADLFLAAKNLSDAILLSDILRVNTEITKAPLSASMIKRYDEHHQDLTLLKALVRQQLPEKYKEIFFDQSKNGYAGYIDGGASQEEFYKFIKPILEKMDGTEELLVKLNREDLLRKQRTFDNGSIPHQIHLGELHAILRRQEDFYPFLKDNREKIEKILTFRIPYYVGPLARGNSRFAWMTRKSEETITPWNFEEVVDKGASAQSFIERMTNFDKNLPNEKVLPKHSLLYEYFTVYNELTKVKYVTEGMRKPAFLSGEQKKAIVDLLFKTNRKVTVKQLKEDYFKKIECFDSVEISGVEDRFNASLGTYHDLLKIIKDKDFLDNEENEDILEDIVLTLTLFEDREMIEERLKTYAHLFDDKVMKQLKRRRYTGWGRLSRKLINGIRDKQSGKTILDFLKSDGFANRNFMQLIHDDSLTFKEDIQKAQVSGQGDSLHEHIANLAGSPAIKKGILQTVKVVDELVKVMGRHKPENIVIEMARENQTTQKGQKNSRERMKRIEEGIKELGSQILKEHPVENTQLQNEKLYLYYLQNGRDMYVDQELDINRLSDYDVDHIVPQSFLKDDSIDNKVLTRSDKNRGKSDNVPSEEVVKKMKNYWRQLLNAKLITQRKFDNLTKAERGGLSELDKAGFIKRQLVETRQITKHVAQILDSRMNTKYDENDKLIREVKVITLKSKLVSDFRKDFQFYKVREINNYHHAHDAYLNAVVGTALIKKYPKLESEFVYGDYKVYDVRKMIAKSEQEIGKATAKYFFYSNIMNFFKTEITLANGEIRKRPLIETNGETGEIVWDKGRDFATVRKVLSMPQVNIVKKTEVQTGGFSKESILPKRNSDKLIARKKDWDPKKYGGFDSPTVAYSVLVVAKVEKGKSKKLKSVKELLGITIMERSSFEKNPIDFLEAKGYKEVKKDLIIKLPKYSLFELENGRKRMLASARELQKGNELALPSKYVNFLYLASHYEKLKGSPEDNEQKQLFVEQHKHYLDEIIEQISEFSKRVILADAQLDKVLSAYNKHRDKPIREQAENIIHLFTLTNLGAPAAFKYFDTTFKQKQYRSTKEVLDATLIHQSITGLYETRIDLSQLGGD

SEQ ID NO: 4583 - protein, 1368 aa, Streptococcus pyogenes
MDKKYSIGLDIGTNSVGWAVITDEYKVPSKKFKVLGNTDRHSIKKNLIGALLFDSGETAEATRLKRTARRRYTRRKNRICYLQEIFSNEMAKVDDSFFHRLEESFLVEEDKKHERHPIFGNIVDEVAYHEKYPTIYHLRKKLVDSTDKADLRLIYLALAHMIKFRGHFLIEGDLNPDNSDVDKLFIQLVQTYNQLFEENPINASGVDAKAILSARLSKSRRLENLIAQLPGEKKNGLFGNLIALSLGLTPNFKSNFDLAEDAKLQLSKDTYDDDLDNLLAQIGDQYADLFLAAKNLSDAILLSDILRVNTEITKAPLSASMIKRYDEHHQDLTLLKALVRQQLPEKYKEIFFDQSKNGYAGYIDGGASQEEFYKFIKPILEKMDGTEELLVKLNREDLLRKQRTFDNGSIPHQIHLGELHAILRRQEDFYPFLKDNREKIEKILTFRIPYYVGPLARGNSRFAWMTRKSEETITPWNFEEVVDKGASAQSFIERMTNFDKNLPNEKVLPKHSLLYEYFTVYNELTKVKYVTEGMRKPAFLSGEQKKAIVDLLFKTNRKVTVKQLKEDYFKKIECFDSVEISGVEDRFNASLGTYHDLLKIIKDKDFLDNEENEDILEDIVLTLTLFEDREMIEERLKTYAHLFDDKVMKQLKRRRYTGWGRLSRKLINGIRDKQSGKTILDFLKSDGFANRNFMQLIHDDSLTFKEDIQKAQVSGQGDSLHEHIANLAGSPAIKKGILQTVKVVDELVKVMGRHKPENIVIEMARENQTTQKGQKNSRERMKRIEEGIKELGSQILKEHPVENTQLQNEKLYLYYLQNGRDMYVDQELDINRLSDYDVDHIVPQSFLKDDSIDNKVLTRSDKNRGKSDNVPSEEVVKKMKNYWRQLLNAKLITQRKFDNLTKAERGGLSELDKAGFIKRQLVETRQITKHVAQILDSRMNTKYDENDKLIREVKVITLKSKLVSDFRKDFQFYKVREINNYHHAHDAYLNAVVGTALIKKYPKLESEFVYGDYKVYDVRKMIAKSEQEIGKATAKYFFYSNIMNFFKTEITLANGEIRKRPLIETNGETGEIVWDKGRDFATVRKVLSMPQVNIVKKTEVQTGGFSKESILPKRNSDKLIARKKDWDPKKYGGFLWPTVAYSVLVVAKVEKGKSKKLKSVKELLGITIMERSSFEKNPIDFLEAKGYKEVKKDLIIKLPKYSLFELENGRKRMLASAKQLQKGNELALPSKYVNFLYLASHYEKLKGSPEDNEQKQLFVEQHKHYLDEIIEQISEFSKRVILADANLDKVLSAYNKHRDKPIREQAENIIHLFTLTNLGAPAAFKYFDTTIDRKQYRSTKEVLDATLIHQSITGLYETRIDLSQLGGD

SEQ ID NO: 4584 - protein, 1368 aa, Streptococcus pyogenes
MDKKYSIGLDIGTNSVGWAVITDEYKVPSKKFKVLGNTDRHSIKKNLIGALLFDSGETAEATRLKRTARRRYTRRKNRICYLQEIFSNEMAKVDDSFFHRLEESFLVEEDKKHERHPIFGNIVDEVAYHEKYPTIYHLRKKLVDSTDKADLRLIYLALAHMIKFRGHFLIEGDLNPDNSDVDKLFIQLVQTYNQLFEENPINASGVDAKAILSARLSKSRRLENLIAQLPGEKKNGLFGNLIALSLGLTPNFKSNFDLAEDAKLQLSKDTYDDDLDNLLAQIGDQYADLFLAAKNLSDAILLSDILRVNTEITKAPLSASMIKRYDEHHQDLTLLKALVRQQLPEKYKEIFFDQSKNGYAGYIDGGASQEEFYKFIKPILEKMDGTEELLVKLNREDLLRKQRTFDNGSIPHQIHLGELHAILRRQEDFYPFLKDNREKIEKILTFRIPYYVGPLARGNSRFAWMTRKSEETITPWNFEEVVDKGASAQSFIERMTNFDKNLPNEKVLPKHSLLYEYFTVYNELTKVKYVTEGMRKPAFLSGEQKKAIVDLLFKTNRKVTVKQLKEDYFKKIECFDSVEISGVEDRFNASLGTYHDLLKIIKDKDFLDNEENEDILEDIVLTLTLFEDREMIEERLKTYAHLFDDKVMKQLKRRRYTGWGRLSRKLINGIRDKQSGKTILDFLKSDGFANRNFMQLIHDDSLTFKEDIQKAQVSGQGDSLHEHIANLAGSPAIKKGILQTVKVVDELVKVMGRHKPENIVIEMARENQTTQKGQKNSRERMKRIEEGIKELGSQILKEHPVENTQLQNEKLYLYYLQNGRDMYVDQELDINRLSDYDVDHIVPQSFLKDDSIDNKVLTRSDKNRGKSDNVPSEEVVKKMKNYWRQLLNAKLITQRKFDNLTKAERGGLSELDKAGFIKRQLVETRQITKHVAQILDSRMNTKYDENDKLIREVKVITLKSKLVSDFRKDFQFYKVREINNYHHAHDAYLNAVVGTALIKKYPKLESEFVYGDYKVYDVRKMIAKSEQEIGKATAKYFFYSNIMNFFKTEITLANGEIRKRPLIETNGETGEIVWDKGRDFATVRKVLSMPQVNIVKKTEVQTGGFSKESILPKRNSDKLIARKKDWDPKKYGGFVSPTVAYSVLVVAKVEKGKSKKLKSVKELLGITIMERSSFEKNPIDFLEAKGYKEVKKDLIIKLPKYSLFELENGRKRMLASAGELQKGNELALPSKYVNFLYLASHYEKLKGSPEDNEQKQLFVEQHKHYLDEIIEQISEFSKRVILADANLDKVLSAYNKHRDKPIREQAENIIHLFTLTNLGAPAAFKYFDTTIDRKQYRSTKEVLDATLIHQSITGLYETRIDLSQLGGD

SEQ ID NO: 4585 - protein, 1368 aa, Streptococcus pyogenes
MDKKYSIGLDIGTNSVGWAVITDEYKVPSKKFKVLGNTDRHSIKKNLIGALLFDSGETAEATRLKRTARRRYTRRKNRICYLQEIFSNEMAKVDDSFFHRLEESFLVEEDKKHERHPIFGNIVDEVAYHEKYPTIYHLRKKLVDSTDKADLRLIYLALAHMIKFRGHFLIEGDLNPDNSDVDKLFIQLVQTYNQLFEENPINASGVDAKAILSARLSKSRRLENLIAQLPGEKKNGLFGNLIALSLGLTPNFKSNFDLAEDAKLQLSKDTYDDDLDNLLAQIGDQYADLFLAAKNLSDAILLSDILRVNTEITKAPLSASMIKRYDEHHQDLTLLKALVRQQLPEKYKEIFFDQSKNGYAGYIDGGASQEEFYKFIKPILEKMDGTEELLVKLNREDLLRKQRTFDNGSIPHQIHLGELHAILRRQEDFYPFLKDNREKIEKILTFRIPYYVGPLARGNSRFAWMTRKSEETITPWNFEEVVDKGASAQSFIERMTNFDKNLPNEKVLPKHSLLYEYFTVYNELTKVKYVTEGMRKPAFLSGEQKKAIVDLLFKTNRKVTVKQLKEDYFKKIECFDSVEISGVEDRFNASLGTYHDLLKIIKDKDFLDNEENEDILEDIVLTLTLFEDREMIEERLKTYAHLFDDKVMKQLKRRRYTGWGRLSRKLINGIRDKQSGKTILDFLKSDGFANRNFMQLIHDDSLTFKEDIQKAQVSGQGDSLHEHIANLAGSPAIKKGILQTVKVVDELVKVMGRHKPENIVIEMARENQTTQKGQKNSRERMKRIEEGIKELGSQILKEHPVENTQLQNEKLYLYYLQNGRDMYVDQELDINRLSDYDVDHIVPQSFLKDDSIDNKVLTRSDKNRGKSDNVPSEEVVKKMKNYWRQLLNAKLITQRKFDNLTKAERGGLSELDKAGFIKRQLVETRQITKHVAQILDSRMNTKYDENDKLIREVKVITLKSKLVSDFRKDFQFYKVREINNYHHAHDAYLNAVVGTALIKKYPKLESEFVYGDYKVYDVRKMIAKSEQEIGKATAKYFFYSNIMNFFKTEITLANGEIRKRPLIETNGETGEIVWDKGRDFATVRKVLSMPQVNIVKKTEVQTGGFSKESILPKRNSDKLIARKKDWDPKKYGGFVSPTVAYSVLVVAKVEKGKSKKLKSVKELLGITIMERSSFEKNPIDFLEAKGYKEVKKDLIIKLPKYSLFELENGRKRMLASARELQKGNELALPSKYVNFLYLASHYEKLKGSPEDNEQKQLFVEQHKHYLDEIIEQISEFSKRVILADANLDKVLSAYNKHRDKPIREQAENIIHLFTLTNLGAPAAFKYFDTTIDRKEYRSTKEVLDATLIHQSITGLYETRIDLSQLGGD

SEQ ID NO: 4586 - protein, 1368 aa, Streptococcus pyogenes
MDKKYSIGLDIGTNSVGWAVITDEYKVPSKKFKVLGNTDRHSIKKNLIGALLFDSGETAEATRLKRTARRRYTRRKNRICYLQEIFSNEMAKVDDSFFHRLEESFLVEEDKKHERHPIFGNIVDEVAYHEKYPTIYHLRKKLVDSTDKADLRLIYLALAHMIKFRGHFLIEGDLNPDNSDVDKLFIQLVQTYNQLFEENPINASGVDAKAILSARLSKSRRLENLIAQLPGEKKNGLFGNLIALSLGLTPNFKSNFDLAEDTKLQLSKDTYDDDLDNLLAQIGDQYADLFLAAKNLSDAILLSDILRVNTEITKAPLSASMIKLYDEHHQDLTLLKALVRQQLPEKYKEIFFDQSKNGYAGYIDGGASQEEFYKFIKPILEKMDGTEELLVKLNREDLLRKQRTFDNGIIPHQIHLGELHAILRRQEDFYPFLKDNREKIEKILTFRIPYYVGPLARGNSRFAWMTRKSEETITPWNFEKVVDKGASAQSFIERMTNFDKNLPNEKVLPKHSLLYEYFTVYNELTKVKYVTEGMRKPAFLSGDQKKAIVDLLFKTNRKVTVKQLKEDYFKKIECFDSVEISGVEDRFNASLGTYHDLLKIIKDKDFLDNEENEDILEDIVLTLTLFEDREMIEERLKTYAHLFDDKVMKQLKRRRYTGWGRLSRKLINGIRDKQSGKTILDFLKSDGFANRNFIQLIHDDSLTFKEDIQKAQVSGQGDSLHEHIANLAGSPAIKKGILQTVKVVDELVKVMGRHKPENIVIEMARENQTTQKGQKNSRERMKRIEEGIKELGSQILKEHPVENTQLQNEKLYLYYLQNGRDMYVDQELDINRLSDYDVDHIVPQSFLKDDSIDNKVLTRSDKNRGKSDNVPSEEVVKKMKNYWRQLLNAKLITQRKFDNLTKAERGGLSELDKAGFIKRQLVETRQITKHVAQILDSRMNTKYDENDKLIREVKVITLKSKLVSDFRKDFQFYKVREINNYHHAHDAYLNAVVGTALIKKYPKLESEFVYGDYKVYDVRKMIAKSEQEIGKATAKYFFYSNIMNFFKTEITLANGEIRKRPLIETNGETGEIVWDKGRDFATVRKVLSMPQVNIVKKTEVQTGGFSKESILPKRNSDKLIARKKDWDPKKYGGFDSPTVAYSVLVVAKVEKGKSKKLKSVKELLGITIMERSSFEKNPIDFLEAKGYKEVKKDLIIKLPKYSLFELENGRKRMLASAGVLQKGNELALPSKYVNFLYLASHYEKLKGSPEDNEQKQLFVEQHKHYLDEIIEQISEFSKRVILADANLDKVLSAYNKHRDKPIREQAENIIHLFTLTNLGAPAAFKYFDTTIDRKRYTSTKEVLDATLIHQSITGLYETRIDLSQLGGD

SEQ ID NO: 4587 - protein, 1368 aa, Streptococcus pyogenes
MDKKYSIGLDIGTNSVGWAVITDEYKVPSKKFKVLGNTDRHSIKKNLIGALLFDSGETAEATRLKRTARRRYTRRKNRICYLQEIFSNEMAKVDDSFFHRLEESFLVEEDKKHERHPIFGNIVDEVAYHEKYPTIYHLRKKLVDSTDKADLRLIYLALAHMIKFRGHFLIEGDLNPDNSDVDKLFIQLVQTYNQLFEENPINASGVDAKAILSARLSKSRRLENLIAQLPGEKKNGLFGNLIALSLGLTPNFKSNFDLAEDTKLQLSKDTYDDDLDNLLAQIGDQYADLFLAAKNLSDAILLSDILRVNTEITKAPLSASMIKLYDEHHQDLTLLKALVRQQLPEKYKEIFFDQSKNGYAGYIDGGASQEEFYKFIKPILEKMDGTEELLVKLNREDLLRKQRTFDNGIIPHQIHLGELHAILRRQEDFYPFLKDNREKIEKILTFRIPYYVGPLARGNSRFAWMTRKSEETITPWNFEKVVDKGASAQSFIERMTNFDKNLPNEKVLPKHSLLYEYFTVYNELTKVKYVTEGMRKPAFLSGDQKKAIVDLLFKTNRKVTVKQLKEDYFKKIECFDSVEISGVEDRFNASLGTYHDLLKIIKDKDFLDNEENEDILEDIVLTLTLFEDREMIEERLKTYAHLFDDKVMKQLKRRRYTGWGRLSRKLINGIRDKQSGKTILDFLKSDGFANRNFIQLIHDDSLTFKEDIQKAQVSGQGDSLHEHIANLAGSPAIKKGILQTVKVVDELVKVMGRHKPENIVIEMARENQTTQKGQKNSRERMKRIEEGIKELGSQILKEHPVENTQLQNEKLYLYYLQNGRDMYVDQELDINRLSDYDVDHIVPQSFLKDDSIDNKVLTRSDKNRGKSDNVPSEEVVKKMKNYWRQLLNAKLITQRKFDNLTKAERGGLSELDKAGFIKRQLVETRQITKHVAQILDSRMNTKYDENDKLIREVKVITLKSKLVSDFRKDFQFYKVREINNYHHAHDAYLNAVVGTALIKKYPKLESEFVYGDYKVYDVRKMIAKSEQEIGKATAKYFFYSNIMNFFKTEITLANGEIRKRPLIETNGETGEIVWDKGRDFATVRKVLSMPQVNIVKKTEVQTGGFSKESIRPKRNSDKLIARKKDWDPKKYGGFVSPTVAYSVLVVAKVEKGKSKKLKSVKELLGITIMERSSFEKNPIDFLEAKGYKEVKKDLIIKLPKYSLFELENGRKRMLASARFLQKGNELALPSKYVNFLYLASHYEKLKGSPEDNEQKQLFVEQHKHYLDEIIEQISEFSKRVILADANLDKVLSAYNKHRDKPIREQAENIIHLFTLTNLGAPRAFKYFDTTIDRKVYRSTKEVLDATLIHQSITGLYETRIDLSQLGGD

SEQ ID NO: 4588 - protein, 1122 aa, Streptococcus thermophilus
MSDLVLGLDIGIGSVGVGILNKVTGEIIHKNSRIFPAAQAENNLVRRTNRQGRRLARRKKHRRVRLNRLFEESGLITDFTKISINLNPYQLRVKGLTDELSNEELFIALKNMVKHRGISYLDDASDDGNSSVGDYAQIVKENSKQLETKTPGQIQLERYQTYGQLRGDFTVEKDGKKHRLINVFPTSAYRSEALRILQTQQEFNPQITDEFINRYLEILTGKRKYYHGPGNEKSRTDYGRYRTSGETLDNIFGILIGKCTFYPDEFRAAKASYTAQEFNLLNDLNNLTVPTETKKLSKEQKNQIINYVKNEKAMGPAKLFKYIAKLLSCDVADIKGYRIDKSGKAEIHTFEAYRKMKTLETLDIEQMDRETLDKLAYVLTLNTEREGIQEALEHEFADGSFSQKQVDELVQFRKANSSIFGKGWHNFSVKLMMELIPELYETSEEQMTILTRLGKQKTTSSSNKTKYIDEKLLTEEIYNPVVAKSVRQAIKIVNAAIKEYGDFDNIVIEMARETNEDDEKKAIQKIQKANKDEKDAAMLKAANQYNGKAELPHSVFHGHKQLATKIRLWHQQGERCLYTGKTISIHDLINNSNQFEVDHILPLSITFDDSLANKVLVYATANQEKGQRTPYQALDSMDDAWSFRELKAFVRESKTLSNKKKEYLLTEEDISKFDVRKKFIERNLVDTRYASRVVLNALQEHFRAHKIDTKVSVVRGQFTSQLRRHWGIEKTRDTYHHHAVDALIIAASSQLNLWKKQKNTLVSYSEEQLLDIETGELISDDEYKESVFKAPYQHFVDTLKSKEFEDSILFSYQVDSKFNRKISDATIYATRQAKVGKDKKDETYVLGKIKDIYTQDGYDAFMKIYKKDKSKFLMYRHDPQTFEKVIEPILENYPNKQMNEKGKEVPCNPFLKYKEEHGYIRKYSKKGNGPEIKSLKYYDSKLLGNPIDITPENSKNKVVLQSLKPWRTDVYFNKATGKYEILGLKYADLQFEKGTGTYKISQEKYNDIKKKEGVDSDSEFKFTLYKNDLLLVKDTETKEQQLFRFLSRTLPKQKHYVELKPYDKQKFEGGEALIKVLGNVANGGQCIKGLAKSNISIYKVRTDVLGNQHIIKNEGDKPKLDF

SEQ ID NO: 4589 - protein, 1122 aa, Streptococcus thermophilus
MSDLVLGLDIGIGSVGVGILNKVTGEIIHKNSRIFPAAQAENNLVRRTNRQGRRLARRKKHRRVRLNRLFEESGLITDFTKISINLNPYQLRVKGLTDELSNEELFIALKNMVKHRGISYLDDASDDGNSSVGDYAQIVKENSKQLETKTPGQIQLERYQTYGQLRGDFTVEKDGKKHRLINVFPTSAYRSEALRILQTQQEFNPQITDEFINRYLEILTGKRKYYHGPGNEKSRTDYGRYRTSGETLDNIFGILIGKCTFYPDEFRAAKASYTAQEFNLLNDLNNLTVPTETKKLSKEQKNQIINYVKNEKAMGPAKLFKYIAKLLSCDVADIKGYRIDKSGKAEIHTFEAYRKMKTLETLDIEQMDRETLDKLAYVLTLNTEREGIQEALEHEFADGSFSQKQVDELVQFRKANSSIFGKGWHNFSVKLMMELIPELYETSEEQMTILTRLGKQKTTSSSNKTKYIDEKLLTEEIYNPVVAKSVRQAIKIVNAAIKEYGDFDNIVIEMARETNEDDEKKAIQKIQKANKDEKDAAMLKAANQYNGKAELPHSVFHGHKQLATKIRLWHQQGERCLYTGKTISIHDLINNSNQFEVDHILPLSITFDDSLANKVLVYATANQEKGQRTPYQALDSMDDAWSFRELKAFVRESKTLSNKKKEYLLTEEDISKFDVRKKFIERNLVDTRYASRVVLNALQEHFRAHKIDTKVSVVRGQFTSQLRRHWGIEKTRDTYHHHAVDALIIAASSQLNLWKKQKNTLVSYSEEQLLDIETGELISDDEYKESVFKAPYQHFVDTLKSKEFEDSILFSYQVDSKFNRKISDATIYATRQAKVGKDKKDETYVLGKIKDIYTQDGYDAFMKIYKKDKSKFLMYRHDPQTFEKVIEPILENYPNKQMNEKGKEVPCNPFLKYKEEHGYIRKYSKKGNGPEIKSLKYYDSKLLGNPIDITPENSKNKVVLQSLKPWRTDVYFNKNTGKYEILGLKYADLQFEKKTGTYKISQEKYNGIMKEEGVDSDSEFKFTLYKNDLLLVKDTETKEQQLFRFLSRTMPNVKYYVELKPYSKDKFEKNESLIEILGSADKSGRCIKGLGKSNISIYKVRTDVLGNQHIIKNEGDKPKLDF

SEQ ID NO: 4590 - protein, 1120 aa, Streptococcus thermophilus
MSDLVLGLDIGIGSVGVGILNKVTGEIIHKNSRIFPAAQAENNLVRRTNRQGRRLARRKKHRRVRLNRLFEESGLITDFTKISINLNPYQLRVKGLTDELSNEELFIALKNMVKHRGISYLDDASDDGNSSVGDYAQIVKENSKQLETKTPGQIQLERYQTYGQLRGDFTVEKDGKKHRLINVFPTSAYRSEALRILQTQQEFNPQITDEFINRYLEILTGKRKYYHGPGNEKSRTDYGRYRTSGETLDNIFGILIGKCTFYPDEFRAAKASYTAQEFNLLNDLNNLTVPTETKKLSKEQKNQIINYVKNEKAMGPAKLFKYIAKLLSCDVADIKGYRIDKSGKAEIHTFEAYRKMKTLETLDIEQMDRETLDKLAYVLTLNTEREGIQEALEHEFADGSFSQKQVDELVQFRKANSSIFGKGWHNFSVKLMMELIPELYETSEEQMTILTRLGKQKTTSSSNKTKYIDEKLLTEEIYNPVVAKSVRQAIKIVNAAIKEYGDFDNIVIEMARETNEDDEKKAIQKIQKANKDEKDAAMLKAANQYNGKAELPHSVFHGHKQLATKIRLWHQQGERCLYTGKTISIHDLINNSNQFEVDHILPLSITFDDSLANKVLVYATANQEKGQRTPYQALDSMDDAWSFRELKAFVRESKTLSNKKKEYLLTEEDISKFDVRKKFIERNLVDTRYASRVVLNALQEHFRAHKIDTKVSVVRGQFTSQLRRHWGIEKTRDTYHHHAVDALIIAASSQLNLWKKQKNTLVSYSEDQLLDIETGELISDDEYKESVFKAPYQHFVDTLKSKEFEDSILFSYQVDSKFNRKISDATIYATRQAKVGKDKADETYVLGKIKDIYTQDGYDAFMKIYKKDKSKFLMYRHDPQTFEKVIEPILENYPNKQINEKGKEVPCNPFLKYKEEHGYIRKYSKKGNGPEIKSLKYYDSKLGNHIDITPKDSNNKVVLQSLKPWRTDVYFNKNTGKYEILGLKYSDMQFEKGTGKYSISKEQYENIKVREGVDENSEFKFTLYKNDLLLLKDSENGEQILLRFTSRNDTSKHYVELKPYNRQKFEGSEYLIKSLGTVAKGGQCIKGLGKSNISIYKVRTDVLGNQHIIKNEGDKPKLDF

SEQ ID NO: 4591 - protein, 1120 aa, Streptococcus thermophilus
MSDLVLGLDIGIGSVGVGILNKVTGEIIHKNSRIFPAAQAENNLVRRTNRQGRRLARRKKHRRVRLNRLFEESGLITDFTKISINLNPYQLRVKGLTDELSNEELFIALKNMVKHRGISYLDDASDDGNSSVGDYAQIVKENSKQLETKTPGQIQLERYQTYGQLRGDFTVEKDGKKHRLINVFPTSAYRSEALRILQTQQEFNPQITDEFINRYLEILTGKRKYYHGPGNEKSRTDYGRYRTSGETLDNIFGILIGKCTFYPDEFRAAKASYTAQEFNLLNDLNNLTVPTETKKLSKEQKNQIINYVKNEKAMGPAKLFKYIAKLLSCDVADIKGYRIDKSGKAEIHTFEAYRKMKTLETLDIEQMDRETLDKLAYVLTLNTEREGIQEALEHEFADGSFSQKQVDELVQFRKANSSIFGKGWHNFSVKLMMELIPELYETSEEQMTILTRLGKQKTTSSSNKTKYIDEKLLTEEIYNPVVAKSVRQAIKIVNAAIKEYGDFDNIVIEMARETNEDDEKKAIQKIQKANKDEKDAAMLKAANQYNGKAELPHSVFHGHKQLATKIRLWHQQGERCLYTGKTISIHDLINNSNQFEVDHILPLSITFDDSLANKVLVYATANQEKGQRTPYQALDSMDDAWSFRELKAFVRESKTLSNKKKEYLLTEEDISKFDVRKKFIERNLVDTRYASRVVLNALQEHFRAHKIDTKVSVVRGQFTSQLRRHWGIEKTRDTYHHHAVDALIIAASSQLNLWKKQKNTLVSYSEDQLLDIETGELISDDEYKESVFKAPYQHFVDTLKSKEFEDSILFSYQVDSKFNRKISDATIYATRQAKVGKDKADETYVLGKIKDIYTQDGYDAFMKIYKKDKSKFLMYRHDPQTFEKVIEPILENYPNKQINEKGKEVPCNPFLKYKEEHGYIRKYSKKGNGPEIKSLKYYDSKLGNHIDITPKDSNNKVVLQSLKPWRTDVYFNKNTGKYEILGLKYSDMQFEKGTGKYSISKEQYENIKVREGVDENSEFKFTLYKNDLLLLKDSENGEQILLRFTSRNDTSKHYVELKPYNRQKFEGSEYLIKSLGTVVKGGRCIKGLGKSNISIYKVRTDVLGNQHIIKNEGDKPKLDF

SEQ ID NO: 4592 - protein, 1057 aa, Staphylococcus sp.
MNQKFILGLDIGITSVGYGLIDYETKNIIDAGVRLFPEANVENNEGRRSKRGSRRLKRRRIHRLERVKLLLTEYDLINKEQIPTSNNPYQIRVKGLSEILSKDELAIALLHLAKRRGIHNVDVAADKEETASDSLSTKDQINKNAKFLESRYVCELQKERLENEGHVRGVENRFLTKDIVREAKKIIDTQMQYYPEIDETFKEKYISLVETRREYFEGPGQGSPFGWNGDLKKWYEMLMGHCTYFPQELRSVKYAYSADLFNALNDLNNLIIQRDNSEKLEYHEKYHIIENVFKQKKKPTLKQIAKEIGVNPEDIKGYRITKSGTPEFTSFKLFHDLKKVVKDHAILDDIDLLNQIAEILTIYQDKDSIVAELGQLEYLMSEADKQSISELTGYTGTHSLSLKCMNMIIDELWHSSMNQMEVFTYLNMRPKKYELKGYQRIPTDMIDDAILSPVVKRTFIQSINVINKVIEKYGIPEDIIIELARENNSDDRKKFINNLQKKNEATRKRINEIIGQTGNQNAKRIVEKIRLHDQQEGKCLYSLESIPLEDLLNNPNHYEVDHIIPRSVSFDNSYHNKVLVKQSENSKKSNLTPYQYFNSGKSKLSYNQFKQHILNLSKSQDRISKKKKEYLLEERDINKFEVQKEFINRNLVDTRYATRELTNYLKAYFSANNMNVKVKTINGSFTDYLRKVWKFKKERNHGYKHHAEDALIIANADFLFKENKKLKAVNSVLEKPEIETKQLDIQVDSEDNYSEMFIIPKQVQDIKDFRNFKYSHRVDKKPNRQLINDTLYSTRKKDNSTYIVQTIKDIYAKDNTTLKKQFDKSPEKFLMYQHDPRTFEKLEVIMKQYANEKNPLAKYHEETGEYLTKYSKKNNGPIVKSLKYIGNKLGSHLDVTHQFKSSTKKLVKLSIKNYRFDVYLTEKGYKFVTIAYLNVFKKDNYYYIPKDKYQELKEKKKIKDTDQFIASFYKNDLIKLNGDLYKIIGVNSDDRNIIELDYYDIKYKDYCEINNIKGEPRIKKTIGKKTESIEKFTTDVLGNLYLHSTEKAPQLIFKRGL

SEQ ID NO: 4593 - protein, 1057 aa, Staphylococcus sp.
MNQKFILGLDIGITSVGYGLIDYETKNIIDAGVRLFPEANVENNEGRRSKRGSRRLKRRRIHRLERVKLLLTEYDLINKEQIPTSNNPYQIRVKGLSEILSKDELAIALLHLAKRRGIHNVDVAADKEETASDSLSTKDQINKNAKFLESRYVCELQKERLENEGHVRGVENRFLTKDIVREAKKIIDTQMQYYPEIDETFKEKYISLVETRREYFEGPGQGSPFGWNGDLKKWYEMLMGHCTYFPQELRSVKYAYSADLFNALNDLNNLIIQRDNSEKLEYHEKYHIIENVFKQKKKPTLKQIAKEIGVNPEDIKGYRITKSGTPEFTSFKLFHDLKKVVKDHAILDDIDLLNQIAEILTIYQDKDSIVAELGQLEYLMSEADKQSISELTGYTGTHSLSLKCMNMIIDELWHSSMNQMEVFTYLNMRPKKYELKGYQRIPTDMIDDAILSPVVKRTFIQSINVINKVIEKYGIPEDIIIELARENNSDDRKKFINNLQKKNEATRKRINEIIGQTGNQNAKRIVEKIRLHDQQEGKCLYSLESIPLEDLLNNPNHYEVDHIIPRSVSFDNSYHNKVLVKQSENSKKSNLTPYQYFNSGKSKLSYNQFKQHILNLSKSQDRISKKKKEYLLEERDINKFEVQKEFINRNLVDTRYATRELTSYLKAYFSANNMDVKVKTINGSFTNHLRKVWRFDKYRNHGYKHHAEDALIIANADFLFKENKKLQNTNKILEKPTIENNTKKVTVEKEEDYNNVFETPKLVEDIKQYRDYKFSHRVDKKPNRQLINDTLYSTRMKDEHDYIVQTITDIYGKDNTNLKKQFNKNPEKFLMYQNDPKTFEKLSIIMKQYSDEKNPLAKYYEETGEYLTKYSKKNNGPIVKKIKLLGNKVGNHLDVTNKYENSTKKLVKLSIKNYRFDVYLTEKGYKFVTIAYLNVFKKDNYYYIPKDKYQELKEKKKIKDTDQFIASFYKNDLIKLNGDLYKIIGVNSDDRNIIELDYYDIKYKDYCEINNIKGEPRIKKTIGKKTESIEKFTTDVLGNLYLHSTEKAPQLIFKRGL

SEQ ID NO: 4594 - protein, 1367 aa, unidentified
DKKYSIGLDIGTNSVGWAVITDEYKVPSKKFKVLGNTDRHSIKKNLIGALLFDSGETAEATRLKRTARRRYTRRKNRICYLQEIFSNEMAKVDDSFFHRLEESFLVEEDKKHERHPIFGNIVDEVAYHEKYPTIYHLRKKLVDSTDKADLRLIYLALAHMIKFRGHFLIEGDLNPDNSDVDKLFIQLVQTYNQLFEENPINASGVDAKAILSARLSKSRRLENLIAQLPGEKKNGLFGNLIALSLGLTPNFKSNFDLAEDAKLQLSKDTYDDDLDNLLAQIGDQYADLFLAAKNLSDAILLSDILRVNTEITKAPLSASMIKRYDEHHQDLTLLKALVRQQLPEKYKEIFFDQSKNGYAGYIDGGASQEEFYKFIKPILEKMDGTEELLVKLNREDLLRKQRTFDNGSIPHQIHLGELHAILRRQEDFYPFLKDNREKIEKILTFRIPYYVGPLARGNSRFAWMTRKSEETITPWNFEEVVDKGASAQSFIERMTNFDKNLPNEKVLPKHSLLYEYFTVYNELTKVKYVTEGMRKPAFLSGEQKKAIVDLLFKTNRKVTVKQLKEDYFKKIECFDSVEISGVEDRFNASLGTYHDLLKIIKDKDFLDNEENEDILEDIVLTLTLFEDREMIEERLKTYAHLFDDKVMKQLKRRRYTGWGRLSRKLINGIRDKQSGKTILDFLKSDGFANRNFMQLIHDDSLTFKEDIQKAQVSGQGDSLHEHIANLAGSPAIKKGILQTVKVVDELVKVMGRHKPENIVIEMARENQTTQKGQKNSRERMKRIEEGIKELGSQILKEHPVENTQLQNEKLYLYYLQNGRDMYVDQELDINRLSDYDVDAIVPQSFLKDDSIDNKVLTRSDKNRGKSDNVPSEEVVKKMKNYWRQLLNAKLITQRKFDNLTKAERGGLSELDKAGFIKRQLVETRQITKHVAQILDSRMNTKYDENDKLIREVKVITLKSKLVSDFRKDFQFYKVREINNYHHAHDAYLNAVVGTALIKKYPKLESEFVYGDYKVYDVRKMIAKSEQEIGKATAKYFFYSNIMNFFKTEITLANGEIRKRPLIETNGETGEIVWDKGRDFATVRKVLSMPQVNIVKKTEVQTGGFSKESILPKRNSDKLIARKKDWDPKKYGGFDSPTVAYSVLVVAKVEKGKSKKLKSVKELLGITIMERSSFEKNPIDFLEAKGYKEVKKDLIIKLPKYSLFELENGRKRMLASAGELQKGNELALPSKYVNFLYLASHYEKLKGSPEDNEQKQLFVEQHKHYLDEIIEQISEFSKRVILADANLDKVLSAYNKHRDKPIREQAENIIHLFTLTNLGAPAAFKYFDTTIDRKRYTSTKEVLDATLIHQSITGLYETRIDLSQLGGD

SEQ ID NO: 4595 - DNA, 76 bp, synthetic construct
  source 1..76: mol_type = other DNA
gttttagagctagaaatagcaagttaaaataaggctagtccgttatcaacttgaaaaagtggcaccgagtcggtgc

SEQ ID NO: 4596 - DNA, 24 bp, synthetic construct
  source 1..24: mol_type = other DNA
gttgtagctccctttctcatttcg

SEQ ID NO: 4597 - DNA, 25 bp, synthetic construct
  source 1..25: mol_type = other DNA
gttgtagctccctttttcatttcgc

SEQ ID NO: 4598 - DNA, 14 bp, synthetic construct
  source 1..14: mol_type = other DNA
gttttagtactctg

SEQ ID NO: 4599 - DNA, 12 bp, synthetic construct
  source 1..12: mol_type = other DNA
gttttagagcta

SEQ ID NO: 4600 - DNA, 14 bp, synthetic construct
  source 1..14: mol_type = other DNA
gtctttgtactctg

SEQ ID NO: 4601 - DNA, 16 bp, synthetic construct
  source 1..16: mol_type = other DNA
gctatagttccttact

SEQ ID NO: 4602 - DNA, 14 bp, synthetic construct
  source 1..14: mol_type = other DNA
gtcttagtactctg

SEQ ID NO: 4603 - DNA, 12 bp, synthetic construct
  source 1..12: mol_type = other DNA
actggggttcag

SEQ ID NO: 4604 - DNA, 12 bp, synthetic construct
  source 1..12: mol_type = other DNA
gttttagtccct

SEQ ID NO: 4605 - DNA, 16 bp, synthetic construct
  source 1..16: mol_type = other DNA
gtcatagttcccctga

SEQ ID NO: 4606 - DNA, 17 bp, synthetic construct
  source 1..17: mol_type = other DNA
gtttaagagctatgctg

SEQ ID NO: 4607 - DNA, 93 bp, synthetic construct
  source 1..93: mol_type = other DNA
cgaaatgagaaccgttgctacaataaggccgtctgaaaagatgtgccgcaacgctctgccccttaaagcttctgctttaaggggcatcgttta

SEQ ID NO: 4608 - DNA, 82 bp, synthetic construct
  source 1..82: mol_type = other DNA
gcgaaatgaaaaacgttgttacaataagagatgaatttctcgcaaagctctgcctcttgaaatttcggtttcaagaggcatc

SEQ ID NO: 4609 - DNA, 58 bp, synthetic construct
  source 1..58: mol_type = other DNA
cagaatctactaaaacaaggcaaaatgccgtgtttatctcgtcaacttgttggcgaga

SEQ ID NO: 4610 - DNA, 60 bp, synthetic construct
  source 1..60: mol_type = other DNA
tagcaagttaaaataaggctagtccgttatcaacttgaaaaagtggcaccgagtcggtgc

SEQ ID NO: 4611 - DNA, 66 bp, synthetic construct
  source 1..66: mol_type = other DNA
cagaagctacaaagataaggcttcatgccgaaatcaacaccctgtcattttatggcagggtgtttt

SEQ ID NO: 4612 - DNA, 127 bp, synthetic construct
  source 1..127: mol_type = other DNA
ggtaagttgctatagtaagggcaacagacccgaggcgttggggatcgcctagcccgtgtttacgggctctccccatattcaaaataatgacagacgagcaccttggagcatttatctccgaggtgct

SEQ ID NO: 4613 - DNA, 58 bp, synthetic construct
  source 1..58: mol_type = other DNA
cagaatctactaagacaaggcaaaatgccgtgtttatctcgtcaacttgttggcgaga

SEQ ID NO: 4614 - DNA, 76 bp, synthetic construct
  source 1..76: mol_type = other DNA
ctgaacctcagtaagcattggctcgtttccaatgttgattgctccgccggtgctccttatttttaagggcgccggc

SEQ ID NO: 4615 - DNA, 57 bp, synthetic construct
  source 1..57: mol_type = other DNA
agggactaaaataaagagtttgcgggactctgcggggttacaatcccctaaaaccgc

SEQ ID NO: 4616 - DNA, 98 bp, synthetic construct
  source 1..98: mol_type = other DNA
tcagggttactatgataagggctttctgcctaaggcagactgacccgcggcgttggggatcgcctgtcgcccgcttttggcgggcattccccatcctt

SEQ ID NO: 4617 - DNA, 65 bp, synthetic construct
  source 1..65: mol_type = other DNA
cagcatagcaagtttaaataaggctagtccgttatcaacttgaaaaagtggcaccgagtcggtgc

SEQ ID NO: 4618 - DNA, 62 bp, synthetic construct
  source 1..62: mol_type = other DNA
cagaatctactgaaacaagacaatatgtcgtgtttatcccatcaatttattggtgggatttt

SEQ ID NO: 4619 - DNA, 62 bp, synthetic construct
  source 1..62: mol_type = other DNA
cactcctccccatcctctccctctgtccctctgtccctctgaccctgcactgtcccagcacc

SEQ ID NO: 4620 - DNA, 122 bp, synthetic construct
  source 1..122: mol_type = other DNA
caggacacagccttggatcaggacagagacttgggggccatcctgcccctccaacccgacatgtgtacctcagctttttccctcacttgcatcaataaagcttctgtgtttggaacagctaa

SEQ ID NO: 4621 - RNA, 47 nt, synthetic construct
  source 1..47: mol_type = other RNA
gggaaataagagagaaaagaagagtaagaagaaatataagagccacc

SEQ ID NO: 4622 - RNA, 110 nt, synthetic construct
  source 1..110: mol_type = other RNA
tgataataggctggagcctcggtggccatgcttcttgccccttgggcctccccccagcccctcctccccttcctgcacccgtacccccgtggtctttgaataaagtctga

SEQ ID NO: 4623 - DNA, 20 bp, synthetic construct
  source 1..20: mol_type = other DNA
ggcccagactgagcacgtga

SEQ ID NO: 4624 - DNA, 21 bp, synthetic construct
  source 1..21: mol_type = other DNA
gcatggtgcacctgactcctg

SEQ ID NO: 4625 - DNA, 20 bp, synthetic construct
  source 1..20: mol_type = other DNA
gtcaaccagtatcccggtgc

SEQ ID NO: 4626 - DNA, 21 bp, synthetic construct
  source 1..21: mol_type = other DNA
gccttgataccaacctgccca

SEQ ID NO: 4627 - DNA, 13 bp, synthetic construct
  source 1..13: mol_type = other DNA
tctgccatcaaag

SEQ ID NO: 4628 - DNA, 14 bp, synthetic construct
  source 1..14: mol_type = other DNA
agacttctccacag

SEQ ID NO: 4629 - DNA, 13 bp, synthetic construct
  source 1..13: mol_type = other DNA
cgtgctcagtctg

SEQ ID NO: 4630 - DNA, 17 bp, synthetic construct
  source 1..17: mol_type = other DNA
cgtgctcagtctgggcc

SEQ ID NO: 4631 - DNA, 13 bp, synthetic construct
  source 1..13: mol_type = other DNA
gagtcaggtgcac

SEQ ID NO: 4632 - DNA, 117 bp, synthetic construct
  source 1..117: mol_type = other DNA
ggcccagactgagcacgtgagttttagagctagaaatagcaagttaaaataaggctagtccgttatcaacttgaaaaagtggcaccgagtcggtgctctgccatcaaagcgtgctca

SEQ ID NO: 4633 - DNA, 122 bp, synthetic construct
  source 1..122: mol_type = other DNA
ggcccagactgagcacgtgagttttagagctagaaatagcaagttaaaataaggctagtccgttatcaacttgaaaaagtggcaccgagtcggtgctctgccatcaaagcgtgctcagtctg

SEQ ID NO: 4634 - DNA, 126 bp, synthetic construct
  source 1..126: mol_type = other DNA
ggcccagactgagcacgtgagttttagagctagaaatagcaagttaaaataaggctagtccgttatcaacttgaaaaagtggcaccgagtcggtgctctgccatcaaagcgtgctcagtctgggcc

SEQ ID NO: 4635 - DNA, 124 bp, synthetic construct
  source 1..124: mol_type = other DNA
gcatggtgcacctgactcctggttttagagctagaaatagcaagttaaaataaggctagtccgttatcaacttgaaaaagtggcaccgagtcggtgcagacttctccacaggagtcaggtgcac

SEQ ID NO: 4636 - DNA, 20 bp, synthetic construct
  source 1..20: mol_type = other DNA
gccgaagcactgcacgccgt

SEQ ID NO: 4637 - DNA, 13 bp, synthetic construct
  source 1..13: mol_type = other DNA
accctgacgtacg

SEQ ID NO: 4638 - DNA, 13 bp, synthetic construct
  source 1..13: mol_type = other DNA
gcgtgcagtgctt

SEQ ID NO: 4639 - DNA, 20 bp, synthetic construct
  source 1..20: mol_type = other DNA
agaagtcgtgctgcttcatg

SEQ ID NO: 4640 - DNA, 47 bp, synthetic construct
  source 1..47: mol_type = other DNA
accctgacctacggcgtgcagtgcttcggccgctaccccgatcacat

SEQ ID NO: 4641 - DNA, 13 bp, synthetic construct
  source 1..13: mol_type = other DNA
gaagcagcacgac

SEQ ID NO: 4642 - protein, 18 aa, synthetic construct
KRTADGSEFESPKKKRKV

SEQ ID NO: 4643 - protein, 17 aa, synthetic construct
KKTELQTTNAENKTKKL

SEQ ID NO: 4644 - protein, 19 aa, synthetic construct
KRGINDRNFWRGENGRKTR

SEQ ID NO: 4645 - protein, 16 aa, synthetic construct
KRPAATKKAGQAKKKK
